United States Patent Application Publication US 2026/0191916 A1 - sequence listing, part 71

SEQ ID NO: 488 - DNA, 2579689 bp, Enterocloster clostridioformis (residues 1-1,289,845 of 2,579,689)
  source 1..2579689: mol_type = genomic DNA
atcgtttgtttgaaaacttaaaaaatcttcaatcaaagattaagatgagtacacattatacaaatattgaagatcgtaaaaaaaatatagcattaacagaaggactaataagaggaacctttgtaaagaaggagccatcatctttgaatcatggtgcgggtttagctttagattttgaaaattccattcgtaggtctaaaattgaaacaccaaggtatgaatttaaacaaggttttttaagattatcagatgaccggaaatatgataaagaattagaaagtcaaattattcatactatatgtgcaatggctaatatcggtccagatagtgagggttatatatatattggtgtagctgacaaagaaaaagatgctgaaagaattaaaattctggatggaatagaaccaatgaatatatcaaaccattttgtagtgggggtagaaagagaggctataatacttgggatttcggtggaaaactactgtaggaaggttttgagcattattcaagagtcaaaattatcaaaagacttaaaaatagcagttttgactaaaattgatattatagattataaagggttgacagtaattaggatatgtgtaccgaaacaagatgaactttcatactgtggggaggatatttatattcgacaatataacaacactgtaaaattagaaaccgctaaagaaattttggcagtaaataaaatatttgaacaaagataaacgtaatgcatagtctgttgccttttagagaaaaataatcaatatttgtattttgaatttgtattttattgctataagcgcataatagaaaagatattaataatacagaggatgaatatgaaacttggaaaagcgtttgagttatttataaaacacattcttaataaatgtagggttttctgacgtgaaattcgatggattatatatttttgatggggctcctggccaaatgattcaagggctaggggaagcacacaatgcagatgtattattggagcctccagctcaaactcctttttattcttgtacaaggttgttaattgaatgtaaagactaccgcaagaaagtaggtttgaatatgataagaagtacactgggtctgagagaggatattaatcattttgacattgtagatgtaaatagactcttggcccgaaggaggcaaaatagagcgggagttgtctatccctatgaacgttacacttatcaggttgcagtcgcttcactcagcggatttactgttcaagcccaagagtttgcagcaacgcatagaattcctttgctggaatttgataaaatgcctttttggagtgatttttggatgttgcttggttatgataatgtttctttcggtgatagtataaggggacatagaatacctgctgtgcatatggctgaaaatcaaatcattgaattcgctaatgaaatcgggagacgtatggctgttgctgtaacaaattctggtcaattgttgtttttataccggataacaagggaaaataatgatttttctgactcatatacattgcattggagtaattcatctcatccctgggaattgcgatcagggaatcaagtatatttatttcaacttccaaaaagtatcatgaagttgtggttagaaaattctacaaatgatcttgaactaaaaaaagaggctattaattgtaaggcaggttttttatcaagtatgattgtatattattcgcaccattatctgccaactgcgaaaatgatttcaattgataaatatgatttggaacgagccagacgaaatttatagagatgatctaaaatgggaaattcttgagtctttgtaatgtttggaatgaaagtttcttttgggaatgcaaggaaagaaggaacaaagcggggagaggagagtcgtttatgtcaaaaaggaaaacggacattacaatacacagttctgccgcggagtatttgacttatgtggcttcagtcggggatagtaacgatagctttgaaatgcgttatgaggatgaaaatatctggctgacgcaaaaaatgcttgcgactttatatgatgtaaatgtgcgtacaatcaatgaacatattaaaaaaatttatgatgatggtgaactggcacaggagtcaactatccggaaattccggatagttcaaacagaaggtttgcggcaggtgaaccgggaagtgattcactataaccttcaaatgatcgttgcggtcggctttaaagttaacaacgaccgtgccgtaagattccgcaaatgggctggtcagattgtcaaggattatacaattcagggctggacgatggacaaagagcgcctgaaaaaagggcatatgttcaccgatgaatattttgaacgacagctggaaaatattcgtgagatacgcctatctgagcgcaagttttatcaaaaggttacagatctctatgccacagcgtttgattacgacaaagatgccaagactacccggcagtttttcaaaatggtacagaacaagatgcattgggctgtacatcggcatacggcagcagaattgattgtagagcgtgcaaatgctgaaaaagaacatatgggtttgacaacatgggaatcagcgccggatgggaagatcgtcaaagctgatgtaagtgttgctaagaactacctgagcgaaaaggaaatgtcctatttggagagaatcgtttcactttatcttgactatgcggagttacaggccgaacgaaggataccgatgagtatggaggactgggcaaagcgccttgacggattcctggagtttaatgggaatgaactgctgatgggaccgggaaaagtcagtgcagagcaggcaaagcttcatgcagagactgagtttgaaaaatatcgtattgttcaggatcgattatttatgtcagattacgataaatatttgttagaattagaatatcaagcagagcaaagtgatgagtaaagttgattatatcgtttccgctgggggaggagtataccttcccgccatcattattattcactcaacaaatgtggagacaattgtcgaattatgtcaacatttctgaattaagaagattcaggtagtagatagaaagaaacagcactaagttttcacaagtattaaattctatggtattatttaaaggaatatgtggacagggcattcaaaagaaacttgatgtcttctcagtgaggaacaataatgaattcgaaaaggtttgactatgccttttgagaatctttttacagcttcaatacatgtggagactgagtggcgttttcaaagaaagtttgattttatgcttaattgaacgatctatcctgagaaagtgattctgagttgcttaatttaataaaataggaatatttttcgaatatgtaaacaatttctttgttttttatgaaaactagagtattattgtagcaaataaaggagtttccagtatggatgtaagtaagtaataatccgtatcttgacaaaataagaaatcccccagcacttaccgggggaggatctgtcttttactttttaagtttgctgcggcaatcatcaggcagattggaggaccatgggagaagctccgtaagtaagtaataatccgtatcttgacaaaataagaaatcccccagcacttaccgggggaagatctgttttttactttttaagtttgctacggcaatcatcaggcagattggaggaccatgggagaagctccagcatttcttcctttgccggaaacgcaccgagttctttcatcttttccatcacatatgtgagatagttgtatggcttcagtccattcagaagcgcagtttctgtgatgctgtacacagtcgcactggcctgtgccccgcggatgcttttggcaaacagccagttgcgtctccctatggcaaaatttttcagtgcccgctctgcagctagattgtcaatactcagatggccatcttccagataccttttcagataggtttcctggttcagcgtatacaggaccgcctctccgatcttagaagatctgtccacagcatcctccagggtatgaagccactcgaaaaaagcctctaaaagcggctttgcctgcttttgacgctcttcatacctttcttccggtgacttgtcacggatcatctcttcgatcttatagaacatcccgatccgtgccattgcctgatatgcggttgtttccttcagctgctctttggtaaagtcctttttcaaaacggtcagggattcatcaaatctgcgcctcgcatgggccatgcatcctgtcacggtgatcctttccggaaggctgtggtatgcctggtatccatcgcaggtgaaatatccctggtactgatccccaaggaattccaccggatgatatcccgcccgggttctttcgtattggaagaggaccatccggggtgcgccgctgtattcatcagtgagatagacccacatccagttctgggtggaacctttctgttccggctcatgttgttgctaagctaatttgtcatccatactgctctgcttgaatgtcagagacttgctctgtataatgtcaatgaacattctacagaaagagaaagtcccagaagaccctcccgctaagttgtgtcctctgagactcatgataaaaccatgattattgtatcagagtacacggaatctgacaagggggatggcgtaattactatccattgtaacgaaaattgtatatgccccatatgccggtcccctgtcagccaccgtgactggaaaccacgaatcatgaagctggatggcggacaggtggtgtggctgatgattgagcggagacggtgtgacaatgagggctgccggaggcttcacagtcttctccctgataagctcgtcccttataagcattatggctccgaccttatcgctgccgtgctggatggtgatatcatgccggaggataccatgaacgaggattatccttgtgatgaaaccatacggcggtggcaccactggcttatggcaaacttctcccggacagaaggttactgtcggcaggctatgagcctcttaaggaatcccggactggccggcgcggccattttggaaacaattaggaaatcctgtgacaggtggcttcccgctgtcctgcgcatggtctataactcaggcggtttcctggtatccgtctgaggacatcttatatgcacccactttgttttggctgtcagcgctttctgcggtatgctgtccaaaaaggaggtgcataccatgcagacaatcaaaaaagatttaaacgggagggataacgaggcgctctcacgctacaccttgatcgcgccactgcttgatgagagcctggatcccgccaaacgcagccagctgcgggaagaagcagcctcaaagtcaggcttatccgagcgtaccatcttccggtaccttgccgcctatgaagaaaaaggcttcgagggtctcaaacccgtcgtgccggctcaggcggttgtctccgggaggctgccggataattaccggaagattgtggagcaggcaatccaactgaggaaggaagtacccaggcggagcgtggagcagatcatcttcatcctggagcaggagggctgggcggagccgggcgtactcaagcgccctaccctgcagcgtcacctttataaagccggtttcggcacgagacagatgcagacatacgcaagcgcacgcgaaagctcgtccaaacgtttctgcaagcccaacaggatgatgatgctgcaggctgatatcaagtatgggtgtaagctccccatagggaaaaacggggcgatggtgcagacatatctgtcctccgccatcgatgaccactccagatacctggtccattcccggttttatgacaaccaggaggaaagcatcgtggaggataccttccggaacgtcctcttgaaggccggggcttgtgatgccgtatactttgacaacggttcgcagtatgtggcaaaacagctgaaattctcccttgccagacttgggattacggttcggcacgcaaaagtccgcagcggaaaatcaaaggggaaaatagaaaaattccatcaggtggtcgatgcttttctcagggaggcccggatccataaggtcaaaacactggaagagcttaaccggcactggaaaaactacctggaggaatactaccataagcagccgcacgagggcatccgggagtattatgagagccttggcatgcccgtcccaccagaagggatcacccctctccaggagtggaaccgggactgccggcctttaaagttcctggatacatccgtagtggcggaagcgttcctccatcatgaagaacgccttgttgacaaggggtaagtaggtaataatcagtatctgcaaatttccatccacatttgataagataagttcaaatgatggaggtgataccaataaatacgaatgacaatgtaacctcaaaggctgacctttgggcagaccggttccatgcttttcaggaaagcggtttatcccgcaaagaatggtgtcagcagaatggaatcccacagtctacactgggttactggatccgaaagctccagtcagaagcagctgagacagaaagtgcttctgatccggtgtttgcaaagctcccttcggaacatgaactccatttcagtacagcagatacaggaaaacctcctgtgatgctctgtctcccggaaaatatccggattgaagttgctgcggactgtccagccagactgttgactgccctgcttcaggccttaaagaactatgcttgatttttacggaagtactacagtctatctggcatgtggctgcacggacctccggaagagctacactggtttagcggccatcatcaaactgaaattccatctcgatccgtactcccgctgtatgttcgcgttctgcaatcgcaggcgcacattgctcaagatccttcagtgggacgggtcagggttttggatcctgatgaaacggctggaccgcgattccttccattggcctgacacaccggatgaactgcagaaagttacgctgaaagagatccattggctgtgcgatggtttatccctgaaccccagcggcgcatttgaagaacgtcacccgaagatcgtcatatgagcccggatcctgtcaattcgcaaaaagccgaaaatcactttgttttgggcggattttcctccgtcccggaatgcagtttcctataggaacggaatgctttttctggtatactttctggtagagatttcagaaagttgaggctgtgttatggatccgctttttacagaggaacaactgaacaagatgagcagggaggatatcatctccctgatgaaaaccatgcgggagcattatcagaaacaggaaacaaagatccagatcctcgaagaaaaaacaaaggaactggaattcctgaacgcgatgctttctgaccgtctgactcttgcgcagcggaaacagtttggcccatccagcgaaaaatatgcggatggctatacgcagctgaacctttttaacgaggcagagcaggaagcagagcctgatgcgccggagccggaaatggaggagatccatccgtcttcctataaaagaaagaaacgttccggcaaaaaggaggaagatctttccgcctttgagacaacggaagtaattgagtataagctgaccggcgcggaccgaaactgtccggactgcaataccaaatataaagtcgtgacaaaagagacggtgaagcgcctgaagtttgtgcctgcacggtttgaagtggtggaggaggtcacctatgtttacagctgcccgaaatgcggggcgatgaaacgtccggaaaaggcgccttcccttctcaaaggcagtgtggcaacaccatccctggtggcaggcatcatgaacgcaaagtatgtgggcggcatgccccttgcgcgtcaggaacgggaattcgcccgttacgacctgaacctttccacaaagaccatggcgaattggatcatccagtgtgcggaccggtatctgcagccgctttatgaactgatgaaggaagaattcctccggagccggtacgctcatggggatgaaacccgtgttcaggtaatcgatgagccggaacagaaaggttccacccagaactggatgtgggtctatctcactgatgaatacagcggcgcaccccggatggtcctcttccaatacgaaagaacccgggcgggatatcatccggtggaattccttggggatcagtaccagggatatttcacctgcgatggataccaggcataccacagccttccggaaaggatcaccgtgacaggatgcatggcccatgcgaggcgcagatttgatgaatccctgaccgttttgaaaaaggactttaccaaagagcagctgaaggaaacaaccgcatatcaggcaatggcacggatcgggatgttctataagatcgaagagatgatccgtgacaagtcaccggaagaaaggtatgaagagcgtcaaaagcaggcaaagccgcttttagaggcttttttcgagtggcttcataccctggaggatgctgtggacagatcttctaagatcggagaggcggtcctgtatacgctgaaccaggaaacctatctgaaaaggtatctggaagatggccatctgagtattgacaatctagctgcagagcgggcactgaaaaattttgccatagggagacgcaactggctgtttgccaaaagcatccgcggggcacaggccagtgcgactgtgtacagcatcacagaaactgcgcttctgaatggactgaagccatacaactatctcacatatgtgatggaaaagatgaaagaactcggtgcgtttccggcaaaggaagaaatgctggagcttctcccatggtcctccaatctgcctgatgattgccgcagcaaacttaaaaagtaaaagacagatcttcccccggtaagtgctgggggatttcttattttgtcaagatacggattattacttacttacgacaagggcggctgtatcagctttcagggccgcaaatatgagacaaaaccgtcccttatcggtttccgggtggagatttcctatgaccctgcttcgccggaaaccatcacgatccgccataaagggattgaaccgtttaccgcaaagccgctcgaaatgaggccgttttgtgataaaaaagaccccctgccgatttccatgcaggaaacggagccggataattcccgtatgctggaggcgctggaaaagaagagcgcagcatccaaaaagcacatggcagatgccatctctttcggacagtacaggaaggatggtggcagcaatgtataaagctttttacgaaatgcagcgtctccctttcgtgcgcgatatcccgtcggggatgctgtatgagtcaccggcgatggcggacacccttgggcgcctgtcttatgtggcagaccgccagctgttcgccgtggtgacggcggatgccgggtgcggcaagtcaacgctggtgcgccgttttgtggagacgctccccaaagaggaatatatcttcctctacctgtcggactccaaactgaccccaagatggttctacaaaggcatgctcgaccagctgggcgtggaatcaaagttctaccgcggcgatgccaagaggcagcttcagaaggaggtggagatcatccgcggcgtgcagggcaggaaagtcgtctgcatcctggatgaagcacaccttctggaaaaagagaccattgaggaattccgcttcctgctgaattataaattcgattctatgagccctatggcactcgtgctcgtcgggcagacggagctgtgggataaactccggctccagcggtatgcggccgtcaggcagcggattgatttaagctgcatcctgccccatcttgaccgtgcgcagacggaaagatatatccgttcccaccttgcgtatgccggaggcaggcaggatatctttaccgataaggccatggacgagatcttccgcgagtccacggggatcccaaggcgcatcaaccggatctgtaacggctgcctgatgtacgccagccagcagggaaagcgtctcacggacgaacatcaggtaaggtttgtcctcgaacatgagatgctgggaggtgaggcctgatggttcagaacaaagaacatcgcccggcagagacctttgctgaccgcatgcgccagtccggcgtattggatctgctggaggaatacatggacatccgggacgaactggaggaagccctcaattccatagaactgctccatggggatatcaggatcgccatggatgacatcagcggacagcttgaagatcttcaggagcatatggataacgtcagcagtaaactgcgcaggttcaaatcgccgcatgcaaagcagtatgaagttgtcaaagatcaaggcgtgcttccatttgactgaaaagcctatgcaggagcactctctatcaaaacgatggttttaagggtggagaaatccacccagaagccaccgcaatgactgacatgagttagagcagcctgctgaaaaatgaacaaatctggtcagcgtcatatcaggaggtcagtaacagctcatcgattacctgaacacgggtttcatccccatgagcgtaccggctccggaggaattcttccttcatcagttcataaagcggctgcagataccggtccgcacactggatgatccaattcgccatggtctttgtggaaaggttcaggtcgtaacgggcgaattcccgttcctgacgcgcaaggggcatgccgcccacatactttgcgttcatgatgcctgccaccagggatggtgttgccacactgcctttgagaagggaaggcgccttttccggacgtttcatcgccccgcattttgggcagctgtaaacataggtgacctcctccaccacttcaaaccgtgcaggcacaaacttcaggcgcttcaccgtctcttttgtcacgactttatatttggtattgcagtccggacagtttcggtccgcgccggtcagcttatactcaattacttccgttgtctcaaaggcggaaagatcttcctcctttttgccggaacgtttctttcttttataggaagacggatggatctcctccatttccggctccggcgcatcaggctctgcttcctgctctgcctcgttaaaaaggttcagctgcgtatagccatccgcatatttttcgctggatgggccaaactgtttccgctgcgcaagagtcagacggtcagaaagcatcgcgttcaggaattccagttcctttgttttttcttcgaggatctggatctttgtttcctgtttctgataatgctcccgcatggttttcatcagggagatgatatcctccctgctcatcttgttcagttgttcctctgtaaaaagcggatccataacacagcctcaactttctgaaatctctaccagaaagtataccagaaaaagcattccgttcctataggaaactgcattccgggacggaggaaaatccgcccaaaacaaagtgattttcggctttttgcgaattgacaggatccgggctcatatgacgatcttcgggtgacgttcttcaaatgcgccgctggggttcagggataaaccatcgcacagccaatggatctctttcagcgtaactttctgcagttcatccggtgtgtcaggccaatggaaggaatcgcggtccagccgtttcatcaggatccaaaaccctgacccgtcccactgaaggatcttgagcaatgtgcgcctgcgattgcagaacgcgaacatacagcgggagtacggatcgagatggaatttcagtttgatgatggccgctaaaccagtgtagctcttccggaggtccgtgcagccacatgccagatagactgtagtacttccgtaaaaatcaagcatagttctttaaggcctgaagcagggcagtcaacagtctggctggacagtccgcagcaacttcaatccggatattttccgggagacagagcatcacaggaggttttcctgtacctgctgtactgaaatggagttcatgttccgaagggagctttgcaaacaccggatcagaagcactttctgtctcagctgcttctgactggagctttcggatccagtaacccagtgtagactgtgggattccattctgctgacaccattctttgcgggataaaccgctttcctgaaaagcatggaaccggtctgcccaaaggtcagcctttgaggttacattgtcattcgtatttattggtatcacctccatcatttgaacttatcttatcaaatgtggatggaaatttgcagatactgattattacctacttaccctgaaataagcagcgttgatcgtggcagctgcctgtcaggaggggcattggcatcataattccgcttgcggaagacaccaaaaaatgctattgtattcataggcagtggaggtttccgtatttggtgagagtatgaaagtttttctgtaaatagctattaagcattaggtcttctatgataaaatctattatcataaggaggcctattattatggcaagaagagaaaaacagcccgtacacaaagtagtcatgacggaggggaaaaggaacatcgtccatcagctcctggaagagtatgacatccagactgcggaggatatccaggaagccctcaaagacctgctggggagcaccctgaaggagatgatggaagcggagatggatgagcatctcggctatgggaggtcagaacggtcggattcggatgattaccgcaatggctacaagcccaagcggatcaacagcagcttcgggagcatggacatccaggtgccccaggacaggaagtccacgtttgaaccccaggtggtaagaaagcgccagaaggacatttccggcattgaccagaagatcatatccatgtatgcaaaaggcatgacaacccgccaaatctcggataccttgatggacatttatggttttgaggcttcggaagggttcatctcggacgtgacggacaagatactgccgcagattgaagactggcagaaccgcccgctggaggaagtctatcccgtggtctacatcgacgcaatccattattccgtgcgggaggacggggtaatccgcaagcttgccgcctatgtcatcctcggccttacgctggaaggtaaaaaggaagtcctgagcatacagatcggggagaatgaaagctccaagtactggctctgcgttctgaacgagttgaagaaccgcggtgtgaaggatatcctcattctctgctcggacgggctcacgggcattaaggaagccataacggcggcattcccgaagacggagcagcagcgctgcatcgtacatatggtacggaacacgctgaaatacgtctccgacaaggaccggaaagcatttgccacggacctgaaaaccatctaccatgccgcaaacgaggaaaaggcgctggaggcgctggagaaggtgacggaaaagtggacgccaaagtaccccaactcaatgaaacgctggcatgacaactgggatgtggtatcccccatcttcaagttttccatggaggtcaggaaggtgatctatactaccaacgcgatcgagagcctcaactctacctaccggaagctcaaccgccagcggagcgtgttcccgggcagcacggcgctcttaaaggctctgtacctggccacgttcgaggcgacgaagaagtggaccatgcccatccgcaactgggggcaggtctatggggaactgtccattatgtacgaaggcagactgccggaataagagcgcacaggcataggtgtacacctatccggaaaggagctttccatgtatggattttcaaaatacgatgctcaggacaggtacgacagctataatactgtacaggtgaagttaaaactgaatatgaagacagatgcagatatcctggcctgggtcagacagcacaaatatggcagggacacttccgtccaaggggccatcaaggccctgatacgggaagacatcgccagaggccaggccgatgggacacaaggttaatccctctgcattttacattcgttggctgtctgcagctctgacagggattccatgatagacaggtaatcgatcccctccacaacagtccctgtgccagggtcaaacagttcatcgtctgcggtggctttcgggtcataggatttcagttcactgtcataccagctatagatatcactgtataagtcggctgcatgatccagcagggactgcagtccattgatctttgccctgatatcttcaggtacaaagggatcgtctgtttttagcttcatggcacacctcctgatgttttcctgtaagaagtgtaccataatttgatgggattttccaatacatcttgacagaatccaaaagcatccgtatagtaaaggtaggtggtcacgacatccacctacctttctcattaacttatcatagaagatctcaatttacagactttttttcatactctctactgaacagtaaaaagtttgtacgcttaagaagccagtaaatccttatcaattactgacctttcctgcatttcctgaattaattgtgttatgcgtaattcgggattttgccccataaaatgaaaaatatatttccgtaggtaacacatcacggctccttccgatactttccctttcgatgtagtacgttggtagcggatttgttaggagcgaagctttccctctgatcggatagcaagagcctgaatcgttcccattgcaatacacgacaatgccatatgcatttcaatggcacggattgcttccattatctttttacgcgaatagttgtcggtcacttgttcaagagaagttggctctgtctttttgcgataataatcaatcttgggcatatgctttgaccagaaatggtaacagaagcctcccagttgctgcttcaattcccggaaagtgcattcgatccggaacctatagctatataaacggatcatagccactggctctatagaaagactggttcccgccagaatgctttgccccccattatattccaccagaacaaaacgtagttcttgatacagtttctggccccaaagcaggtcggtgctgtagtagcggatcttttctttcttcccataaagttccaactctgtctccaggaacttctccttatgggaatagaagagttccttcagatggtcggcctttcctttcttggcaggtcttccccttccggatcttcggacgctgggtttttcataagcaatgcagttacgtttggcttttgtcacaatttccatatggacagactcttccagggtaagttcttgaagccttgtaagagccggcacggaaagaaaataccggtcaagcaggagcagggaatcgccaaagacctttgctgcctgataagcgtcttctaccatctgtaccacgtgggatgcgttggaaagtaagtaagtaataatccgtatcttgacaaaataagaaatcccccagcacttaccgggggaagatctgtcttttactttttaagtttgctgcggcaatcatcaggcagattggaggaccatgggagaagctccagcatttcttcctttgccggaaacgcaccgagttctttcatcttttccatcacatatgtgagatagttgtatggcttcagtccattcagaagcgcagtttctgtgatgctgtacacagtcgcactggcctgtgccccgcggatgcttttggcaaacagccagttgcgtctccctatggcaaaatttttcagtgcccgctctgcagctagattgtcaatactcagatggccatcttccagataccttttcagataggtttcctggttcagcgtatacaggaccgcctctccgatcttagaagatctgtccacagcatcctccagggtatgaagccactcgaaaaaagcctctaaaagcggctttgcctgcttttgacgctcttcatacctttcttccggtgacttgtcacggatcatctcttcgatcttatagaacatcccgatccgtgccattgcctgatatgcggttgtttccttcagctgctctttggtaaagtcctttttcaaaacggtcagggattcatcaaatctgcgcctcgcatgggccatgcatcctgtcacggtgatcctttccggaaggctgtggtatgcctggtatccatcgcaggtgaaatatccctggtactgatccccaaggaattccaccggatgatatcccgcccgggttctttcgtattggaagaggaccatccggggtgcgccgctgtattcatcagtgagatagacccacatccagttctgggtggaacctttctgttccggctcatcgattacctgaacacgggtttcatccccatgagcgtaccggctccggaggaattcttccttcatcagttcataaagcggctgcagataccggtccgcacactggatgatccaattcgccatggtctttgtggaaaggttcaggtcgtaacgggcgaattcccgttcctgacgcgcaaggggcatgccgcccacatactttgcgttcatgatgcctgccaccagggatggtgttgccacactgcctttgagaagggaaggcgccttttccggacgtttcatcgccccgcatttcgggcagctgtaaacataggtgacctcctccaccacttcaaaccgtgcaggcacaaacttcaggcgcttcaccgtctcttttgtcacgactttatatttggtattgcagtccggacagtttcggtccgcgccggtcagcttatactcaattacttccgttgtctcaaaggcggaaagatcttcctcctttttgccggaacgtttctttcttttataggaagacggatggatctcctccatttccggctccggcgcatcaggctctgcttcctgctctgcctcgttaaaaaggttcagctgcgtatagccatccgcatatttttcgctggatgggccaaactgtttccgctgcgcaagagtcagacggtcagaaagcatcgcgttcaggaattccagttcctttgttttttcttcgaggatctggatctttgtttcctgtttctgataatgctcccgcatggttttcatcagggagatgatatcctccctgctcatcttgttcagttgttcctctgtaaaaagcggatccataacacagcctcaactttctgaaatctctaccagaaagtataccagaaaaagcattccgttcctataggaaactgcattccgggacggaggaaaatccgcccaaaacaaagtgattttcggctttttgcgaattgacaggatccgggctcatatgacgatcttcgggtgacgttcttcaaatgcgccgctggggttcagggataaaccatcgcacagccaatggatctctttcagcgtaactttctgcagttcatccggtgtgtcaggccaatggaaggaatcgcggtccagccgtttcatcaggatccaaaaccctgacccgtcccactgaaggatcttgagcaatgtgcgcctgcgattgcagaacgcgaacatacagcgggagtacggatcgagatggaatttcagtttgatgatggccgctaaaccagtgtagctcttccggaggtccgtgcagccacatgccagatagactgtagtacttccgtaaaaatcaagcatagttctttaaggcctgaagcagggcagtcaacagtctggctggacagtccgcagcaacttcaatccggatattttccgggagacagagcatcacaggaggttttcctgtatctgctgtactgaaatggagttcatgttccgaagggagctttgcaaacaccggatcagaagcactttctgtctcagctgcttctgactggagctttcggatccagtaacccagtgtagactgtgggattccattctgctgacaccattctttgcgggataaaccgctttcctgaaaagcatggaaccggtctgcccaaaggtcagcctttgaggttacattgtcattcgtatttattggtatcacctccatcatttgaacttatcttatcaaatgtggatggaaatttgcagatactgattattacctacttacgttggaaatgcaggaagtatcccaattgcagaccgtcatggagtcggatgctcagtggaatgcatgccaggctatgaatggatccggcaaggatacccagcccaccgaacatatgaccatggataaacgtaagtaagtaataatccgtatcttgacaaaataagaaatcccccagcacttaccgggggaagatctgttttttattttttaagtttgctgcggcaatcatcaggcagattggaggaccatgggagaagctccagcatttcttcctttgccggaaacgcaccgagttctttcatcttttccatcacatatgtgagatagttgtatggcttcagtccattcagaagcgcagtttctgtgatgctgtacacagtcgcactggcctgtgccccgcggatgcttttggcaaacagccagttgcgtctccctatggcaaaatttttcagtgcccgctctgcagctagattgtcaatactcagatggccatcttccagataccttttcagataggtttcctggttcagcgtatacaggaccgcctctccgatcttagaagatctgtccacagcatcctccagggtatgaagccactcaaagaaagcctctaaaagcggctttgcctgcttttgacgctcttcatacctttcttccggtgacttgtcacggatcatctcttcgatcttatagaacatcccgatccgtgccattgcctgatatgcggttgtttccttcagctgctctttggtaaagtcctttttcaaaacggtcagggattcatcaaatctgcgcctcgcatgggccatgcatcctgtcacggtgatcctttccggaaggctgtggtatgcctggtatccatcgcaggtgaaatatccctggtactgatccccaaggaattccaccggatgatatcccgcccgggttctttcgtattggaagaggaccatccggggtgagccgctgtattcatcagtgagatagacccacatccagttctgggtggaacctttctgttccggctcatcgattacctgaacacgggtttcatccccatgagcgtaccggctccggaggaattcttccttcatcagttcataaagcggctgcagataccggtccgcacactggatgatccaattcgccatggtctttgtggaaaggttcaggccgtaacgggcgaattcccgttcctgacgcgcaaggggcatgccgcccacatactttgcgttcatgatgcctgccgccagggatggtgttgccacactgcctttgagaagggaaggcgccttttccggacgtttcatcgccccgcattttgggcagctgtaaacataggtgacctcctccaccacttcaaaccgtgcaggcacaaacttcaggcgcttcaccgtctcttttgtcacgactttatatttggtattgcagtccggacagtttcggtccgcgccggtcagcttatactcaattacttccgttgtctcaaaggcggaaagatcttcctcctttttgccggaacgtttctttcttttataggaagacggatggatctcctccatttccggctccggcgcatcaggctctgcttcctgctctgcctcgttaaaaaggttcagctgcgtatagccatccgcatatttttcgctggatgggccaaactgtttccgctgcgcaagagtcagacggtcagaaagcatcgcgttcaggaattccagttcctttgttttttcttcgaggatctggatctttgtttcctgtttctgataatgctcccgcatggttttcatcagggagatgatatcctccctgctcatcttgttcagttgttcctctgtaaaaagcggatccataacacagcctcaactttctgaaatctctaccagaaagtataccagaaaaagcattccgttcctataggaaactgcattccgggacggaggaaaatccgcccaaaacaaagtgattttcggctttttgcgaattgacaggatccgggctcatatgacgatcttcgggtgacgttcttcaaatgcgccgctggggttcagggataaaccatcgcacagccaatggatctctttcagcgtaactttctgcagttcatccggtgtgtcaggccaatggaaggaatcgcggtccagccgtttcatcaggatccaaaaccctgacccgtcccactgaaggatcttgagcaatgtgcgcctgcgattgcagaacgcgaacatacagcgggagtacggatcgagatggaatttcagtttgatgatggccgctaaaccagtgcagctcttccggaggtccgtgcagccacatgccagatagaccgtagtacttccggaaaaatcaagcatagttctttaaggcctgaagcagggcagtcaacagtctggctggacagtccgcagcagcttcaatccggatattttccgggagacagagcatcacaggaggttttcctgtacctgctgtactgaaatggagttcatgttccgaagggagctttgcaaacaccggatcagaagcactttctgtctcagctgcttctgactggagctttcggatccagtaacccagtgtagactgtgggattccattctgctgacaccattctttgcgggataaaccgctttcctgaaaagcatggaaccggtctgcccaaaggtcagcctttgaggttacattgtcattcgtatttattggtatcacctccatcatttgaacttatcttatcaaatgtggatggaaatttgcagatactgattattacctacttacgatggaaaagatgaaagaactcggtgcgtttccggcaaaggaagaaatgctggagcttctcccatggtcctccaatctgcctgatgattgccgcagcaaacttaaaaagtaaaaaacagatcttcccccgataagtgctgggggatttcttattttgtcaagatacggattattacttacttacctttatggaacaaaatccgagaagacatctgcacttcagatcgagggacagatgtctctttttaatcaaaaagagggtttaatgaagtggaatcctgtgcagatcccaatgcgcaggaacctgacctggttgaagttgagaaacatctccgtaaaaagaaatatacaggccagcgtgaggaattggtcaaaagcattccgcacagcaaagtgctgcatacgatcgatgacagagagaagatctgcgaaaaatgcggaggcacaatggtgagagtcggagaagaatttgtccgcacagaggtacagtttatcccggcgaaactcaaagtcattgaccattacagggaaacctatgaatgcagggcatgccggaaacgtggaaaaccacatatggaaaaagcaccagtaccatatcctccggtcatgcattcccttgcatccgcttctacgatcgcatggctgatccatcagaaattcgaactgggcatcccattacaccgtcaggaaaaggaatggaacgctctcggcttaagcctgagcagggcgacgatgtcaaactggctgctggttgtataccgtgactggcttcagtgtgtagtctgccgtctcaaacaggaactgctgaagcagagttacctgcacatcgatgaaacccatgtacaggtgctgaaggaaccgggccgaaagaacccatcggattcttacatgtgggtttactgcagcatcaaagatgccgcaaatccgatccgttatttcgaataccagcctggccggggcggaaaatatccggaagcatttctggaaggatataacggatatatacacacagatgcgtactccggatacaatggggtaaagggagtgaaacgatgcctgtgctacacacatctgcgccgcgcctttgtagatgcgcttccaaaggatgtccatgatcctaaggcttcgaaaccagcagaagcaatcctgcggctgaataaactattcgaaatcgaaggagaactggaaagtctttcacccgagcagaagaaaaaagaacgtctcatccgcgagaaacaacatctcgaggatttttggtcatgggcagaaaagaatgccatcggagaactaccaaaatcaaagctttcaacagctttccattatacgttgaaccatcgtcaggagttttttaattatctggaagacggacactgttccatcagtaattcgcttgctgaaaactgcatccggccatttgtaatcggtcgaaagaattggctgtttgcaggaagtccaaagggaactgctgcaagcgccggaatatatacactagtataactcaattttaataagtttacattattatcctgaaaaccaagggaaacgtgcgcccaaagcacggacacgtaagccaagaaatcagattactaccaatgcttaaattgtaagcttatttaaatcgagttatactagttgaaacagctaaggctaacgagcttgccccaatgaaatacataaaatacatcctgtcagatatgcccggaagcgctttcctggagcatccagaatatctggatgattatctaccttggaatcccatggtaaaggaaatatgtcaataaccatcaaccttttagtatttagtataagaggctggtggttatttttatatccactatcttgtttgacgcttacgaaaggggtaataaaatgcgaaataaagggacgacaaaactttatgtattaacaggttttttggggctggtaaaactaccttgttgttaaagctcctagaacacctgaaagggaatagggttggtatcatccaaaatgaatttgtcaaattggggattgacggcgcaatcctgaaaaatgatgatatccatatggttgaaatcaaccatggttctattttctgctcctgcctgaaactttcctttgtcagcgcactcagtgaaatgacacagcatgattttgactacctgttcgtagaaagttcaggcctgggagacccatccaatgttgaagaaattcttggggctgttgatgccatctccggtaaaagttatgatttctgtggtgttatccgcttagctgatgcagtaaattttataaatcaactgacagatttagagactgtgtaccgtcagcttaaatattgtcatcttgccgtcattactaaatctgatcttgttgagtggataataatgatggcggcagggcgtaattctccccaagcggaaacggtataattatctttacgcgtcactttgaaccgcttgatattctaattctaacaaatacttatcatagcctgacataaataagcgttcccgaacaatgggatatttttcaaactcagtctccgcataaagttttgcctgctccgcactaatttttcccggccccataagcggttcattccattaaactccaggaatccgtcaaggcgctttgcccagtcttccatactcattcgtatactacgttcctcctgcatcttattctgaaccgtttaaaaaaaactgccgggtagtcttagcatctttatcgtaatctaatgctgtagcataaaaatccgtaaccttctgaataaaacttgcgctcagacagccgtatctaacgaatattctccagctgttaagaaccaacatccctttaaagtcatggcagtctgtctgcgataaaagaatcaacttccaagtatgaaaattattggaacaccagccagcaggcagtaaaccagctaaacacaagtcatagccggatgctccaccaaaaaccggatttttattctgattttttcttattgataagaatcccggccttatcacaaatccgcaccgaaggcactgccacacataacacagaagcagccagtaccagcactcccgcaatcaggaaccagttctcaaccccataccgttccgcaaatatcccggatacaatcagccccagcggtccgctgagcagtcgtatactgctggacaatgacagaacccttcccaggtaccttgcttcaaagttgctttgcagcagcggcgtatacatcccccagtaaaatggtccggagactcccatgagccaggaacataagataaagacataaaaatcatccggcggcaggattcctgatacaaataagctaaaactcattaacagaaaggaaccaacaatggtataaaccctgttttttgttcctccccattttgacaatatcaacgacccaaacaaaagcccggcagagaacaccacctcaacaatactggcacttgtactggttccattaaaatatgacattgtcatcaatggaaacagcgcactggtaggcatcaacgccaaagtataaagacttccaatcgacaccagccccagcatccctttctttgccctgagaatccggaagccttccctcgcctcccgtaaaacctgtacgtttctgtcacgtccctcctgctgcaattccgggatttgcgtgattccaagcgtaattaccgcaatcagcgcccctatgacgtccaaggagataattccgctcaggctccaggaactgtacagcaccgccgcgacaaccgggcttaagatttgtgataccgattccaacgcctgcgaatatcccgcacatctggtcaactggcctgccgggacaatctgcggggtaactgcctgaaggcagggattgtggaacgcggaaccgaccgagcgtgccagcaaaaccgcaagaatcagttctgtcgataacctgcccatccatcctgcgatcaccattacaaaacttgctgccgaaataagaagatctgagataatcatgattctttttcggttatactggtcgataaagacaccgataaacggtcctaaaaccccctgcgggagaaaccccatcatcatagccgccgtcagtaccatggcagaaccggtatggtctgtcagataccacacaaccgcaaattgaaggacagaacttgagaactgggatattgcctgtccggtccagattgtgaagaaattctttttccaatttgttatcactgtatccatgctgtttccattctaatcaaagtttatttaataagcagataaaattcttcttatgccttgtctttctttgtcattaaaatttcactacttagccagaattatatcatatttttgaccatttgatgttattttccgtaataaaataccgggaagacttaaacctccccggcatagatttctttcattgagctgaatgtcaatttcccagcaaaaaccgcttttcttcatcctgcacaattccaggctttgcatatcggtcatatgcctgccatgaaatgccccggtttttattcctgtggatttgtacgtaggcatcatgagtctgaaggaatgcagctccctctgaagacagcttatataccgtttccgggacatgggcattcaagaatccttcttcagcattatcaagtattcgctctatcaggactgctttcttaccagatatcggcaaattcagttccctcagcatgtccttgagttcaggcagcttcaacaattccagcgcctctcctggttctgcctcaattagatacccttccttaatcagcttcttatgatatttgacgcggtctctgattccgcactcgtacagaaaataacttgcatagtaaccatcatctcttattggctgtggtttggaaaatgcccacagaaatacagcctttgcataatccctctgcagcggtggaatctccgggctttttaagcagattcgaaaaaaatcccattctcccgtacctctcttctctttgcaaagtaatgccatgctgctaatacgtttttttcccttctcttctatgtttagctataacacattacctgctgtatcatatttatatattttatctatatgtttagttatatatgaagttctcaatgcatcataagaaatagttctctcaacctataattatcctctctttacaaaccattttctcaaaattaccattgtatctcatctagctgccttaaaaagtattcaccagtttgaggttctaccatttttatgtagtatgcttttccatacagatactctttaaaattaacactccttgcagatgcaatgttttccagatgtgttgaaactccaaattttttacaataataaatctcctgttttaatcttcttttgaatttctttggaatcttcagaccatcttctttgaccagtaaaccagtaatcagttttctttcattttctttaaatatccttgttttattgttatttatagaaaaaccgtatttctttatgatttccgctatgataggaaacaaaaaaaatcctcgatatccactgtcaaaatttgttttttcctatatgcttttcagcattggtaacaatcgatttaccagttacaaacccatgacagcattcactttttttcaatatttcgtccagaatccatctttgccgtatttttaacttcaagctgggagccgttatttctcgttccttagatctcccatgtataataaacacattgtaatacggaaattgtaactgtgtcattttcaatatcttatctacatgatgcccatcagatattacaggcaggtttcttgcaggtgatgaaataaaatattttgtctgtaacgcccccgcggtcctcccggtaggggaactggacagggcagcaacgttaaggcggccgattgaacaatgctttgaggaatgcaagagcaatctggggatggggattatgagtgccgcagctaccaaggctggaaccgccatatgctgtttgtaatgataacccttctgtttgccacccagatacgggaaatctttaaaaaagcaatcccattttctgtgtaatttatacaaaagatgaattgggtttaatgtgggaaaaatttgtgcaaaaacgaaaacaacataccaattggtatgaaaatatactaaaaggtctgatgaatttaaaatacaaacaagtataatatgggcattttaacctataaaataagtaataaatagatttaaattaaaaaatacatgaaaaatctatttacaaacatcatatgttatgctactataaggacagatgaaacaaaaatatcaccaatgattgctagaaaaactgaagttaaatgacaaaatgaccatagaccaccgctgagggagaggagagttcaatgcgcagagatatgaacgaatatcagaatatggatgtacttcccatggctactgcccagaaagttaagacgatgattatccagagggagatgaagcccggtgacaggcttcccacagagaaggagctggcagatctttttggcgtaagccggtctacacttcgggaagccatgaagttcctgagagcggagaatgtggttgtaatccggcaggggagcggaacctttgtgagcgcgggaacgggtattggggaagaccccctggggctgcatttcaccaatcaggagaagctgatccagaatctgtttgagacgcgtatgctgattgaacctcagatcgcaggcctggcctgccagagggccacaccccaggacgtcaggaacctccagttgctggtgacggagatggaccgcagcgaggtcaacagccctgcatcggcggagctggacgtccagttccacaccgcggttgcggaatgtacgcacaacgaagtgctgatccgggtagtgcccatcatcattgagtctatccgccgaagccatgtggagacacatgatgatccggagagttttaagcgggccaagagaagccactcgggaatctgtaaagcaattgccgagggcgatttcatggaagccaagttccaggccgagcggcatgtatgggaaacattaaatgatataaaggaggtagtgtcaagtaatctatgaaaactaagccggaaaaaatcggctcaaatgaaccttgaaaactgcagatataccaagagccaggccctccgggagcttagggcgccgccctaagaacttgcaagggacctgtcccttgacccaatatcgggctctgcccgaacccgtcctcgccggaaggcaggaaaagggcgcacctgcccccttttctgttttacaggattatccgtgaaccttatgtcaagaggctttcgcggcatatcctcgcactttgtgctccggtattccacggtcctcctgacaacagttccgctccttttagactgcggctgttttccggagatttaggatggtctgctggcccagaaagatgagaagctgccatttgcccggcatgttgtctgctccccgcaggatttccacatcattgagcacatggtagttgttgtgtttatgagggcgtagaaagttgtaataagcgacccacagggcaaggtcatagttggctccatcgatggtgtcaaagccgttggtctttcgataggaagccttgtaggtgcggttaagccgttcgatcatctgcttaaaaggccggaattctttggagacggcgtcatcattggtaagcccgatgacctgggtgatgtggaacttaaaagcatcgccgaattcatgaaagaactgctgggcggcaagaggatacgcactatagccatcggcaataaagcggaagtttttgggaagctccttaaagtggcggaatgccatgcgcatggccatgatacaggggccgacgccccggttatctgagaccctgtagccgatgatggagcgtttggcggcatccatgataaaccagatataagatttgatgccgcgaactttgatgtaggtctcgtcggcggtaaaggtagtgccagcgccgtaatcatagttatcaacaaagggcttgatacagatggcggcgctcttgcagtagttagcgatctgctgatgagagatttggatgttgtagaggtctttcagggcctgggaagtcttacgcagagaaagggaaaggtttacatgaagggtgaggcacagggacatgacatgggaatcgaacttattgaatttgagggaggaggcattctttggcagggagtttaagtccatgcgaaagaaatctatcgtgaattcgcggtagaggtagtgaagcttgtattcatttttgccatagtctttctccaggtgttctttatcgacgtttttgaggttatggagatagtagggacatttctggttgacgcatttgtggaggatgaagtgtttccggtcctttttgtggacaagggcatgtccgcagtggggacagcgcagggtatagtgcttggagaagcggttatcatcagtagagaagttggtatcacatactttgcattttaactgtcctttggaaccattattacgataaagaaaaggctgaggagcatggcaggagggacaggtacagtcaggagagatatcgcattccttgcgccgtgcaacaggccgaatcttcttatggtatttatattcgaagtaagggatgaggagctgccagtcccaatcgttttgatgaaactgaagcatagggagttcatcggttctgaatttttggtatttaggggaatgggaatcatcaaaagcccattgtttgagagggatatatttgcagataaaagtaatgagccagcagttctgctggtaaagaaattgaatgagtgacaataaataggtaatactattcataagcaatgaaattcctttctgtgtttgtgggattggtttacctaaagtattgacacaaaaagggaggtcattgcttttttctttgaaaaagtggtgtaatccctaaaaatacaaggtttgtaacaaaaaatgaggtagtaaacttgacactaccataaaggaaacggaggaacgaaaatgaaaaaaagattatttgcaagaaagacactggctctggcaatggcagccctgatggccgcaggcgctctgactggctgttcatcaggctccaaggagacagcggccgcgggggatacaaccgctgcaccggctgcaggttctgaggcggccggctcagaggcggccggcggttccggggaggcggttaccgttaagttccgctactgggcggacaacaccgattattctgcattgatgcaggacattatcaagaaattcaacgcggagaacggtaagggcatcacggttgtgggtgaggagactccctgggacggcggcgcatactctgagaatctctttaacgccaagatgggcggcggagacatcgactgcgcaacctggaagctgacttccaccccgttgtttgtcaacaacgacctgctggccgacctgactccccttgtggacagctgggacaagaaggacgacatagacgagaacatctacagcattatgaaggaagccggaggcacagacagtctctatgttatgccatggaacatccaggtgctgtacgtttactacagaccttccatcttcgaggcagccggcgttgaggttccaaagacctacgaagaattcttaactgcaattgaaaagtgcaccatggacaccaacggcgacggcaagaccgatgtctacggctttggcatgagaggcgccaagggcggccaggagccatggggaagcttcgtatacgggcgcggcggcaattttgaggatatgactaccccggaagctgttcagggtatgcaggacttcatcgacatttacaccaagggctatgtaccgcccacagcaaccagcgacggctttaacgagattattgccaactttaagtccggcttaacagccatgaccattcaccataccggttcttccgctgacatggaagccgccttcggcggcgacgtatccgcattccccttccccgcaggcaagggccagtggacctccatgggtgacactgagactgttattttcgaatcctgccagaacaaagaggctgcatttgagtgggtatcttacctggcgaccggcgaaggccagaagatgtggtgtgaaggcaccggcaatgtacctgtaagcaagactgttcaggccggcgacttcttccggagcaaccgattcatggcagcctccattgaaggacagagctatgcaggtattcttccgatcctggataccacaaccgagtggatctccaccctgtggcccaacaccgtatcccaggcgctcaccggcagcatcactgccgagcagtgcatgaagacccttcagaacggtttgtaccagtaaccattgacacatacgcggggcggcagaaactagtataactcgattttaataagtttacattattatcctgaaaaccaagggaaacgtgcgcccaaagcacggacacgtaagccaagaaatcagattactaccaatgcttaaattgtaagcttatttaaatcgagttatactagtataacccacactaaataccttactgtttcgctggtctgattttcctatagcacaggtgcaaaatactcagcgtagaacccactacgcctccgtttttgcacctgcactctcaaaaaatcatcctcaccgaaccggcaaggcatttaatgtgggtcatactagggccgccccacagaaatcagaaggggggattcaccaatggtcaagaaacggacaatatggccatacctgctggtcgctccggcagtgctcatcattctctgcgtagtgttcattccggtgttcaacgcaattgtcatgagctttcagaagtatgacctgcgcagaccgaaagacattgcatttaacggagtagccaactatatgaaagccttcggggacccgctgttctggaacgccctgtggaggacagtcatatgggtggcggcaggtgtaggcttacagttcctgttcggattcattctggccctccttctgaatcagaagtttgtggggcgcggcatggtccgtgcggtcagcatgattccatgggtaacacctggcgtactgatcggcctgatgtggcgctggatctatgacggcaacttcggcgtactcaacgatttattgttaaaaatccatgcggtcacggacaaaataccctttttgtcccgggtttcaaccgcatttcccagtgtgatcgtaaccattgtatggcagggaattccgttctttgcgctgatgctattagcagctctttcgggcgtgcccgcggaaatgtacgaggcggcggatattgacggcgcgtcaccgtggcagaagctgatgttcgttaccattccatccatcaagaacaccattttcgtaacagcgctgctgcgtgtgatctgggtagccaactcagtggatgtaatctacaacatgacagagggcggaccggcttactctacgcagaccctcagcgtttacatcttcaacaagggcaatgccctggaacttggatatgcgtcagcaatggcccttctgatggcagcggttctgctggtggcagccataccgtatctgaaaatgaactttagggaggagaagtaaggatatgaaaagacaatccggattaaaacgttttgtagccgtatttatcccgctgctcctgatgatggttttcatcctgtttccgttctactggacattcgtaacttctgtgaaaccgcaggatgagctttacggagcggtggttacatactggcccagccacattacttttgaagcctacagcaagctgtttaccaccactgtaaacttctttgctgccatgaagaacagctttatcgttgcttccctgacaactatcgtatcgctgaccgcttccacgctggcggcatatgcattttccagataccagttcacgggaagaaagattttaatgtgtacgttcctgtgcaacaacatgttccccacggtactgctgctgattccgctgtacaccattatgcgtaagatgggactgctgtacactcctgcctccttggttttatcttacaccacatttaccattcccttttccgtatggctgctgctgggcttcctaaacgacctgcccatgtcacttgaggaagcggccctggtagacgggtgcaacagaggctccgcctttttgaagatcattcttccgatcctgggtccctgcctggtggcaaccggagtttacatttttatgacatcctggaatgagtacacatttgccatgatgttcaccaacacggatacacgcaccatcccggtagcgctgaagagcctgatcggacagctgggcgtccagtgggatctgctgactgcaggaggcattatcaccattataccggtgtgtattatgttcttcttcgcacagaagcgtttggtagaaggtttaacagccggagctgtgaaaggttaacttcaagagccgccccgttcggcccgggaaatgccggcgggttgacgtccataaacaaggaaagctcccttcgcatacgctgaggggaaagtcaaggaaagtccccttcgcataagctcaggggggagatgaggaggaaaacaattatgcggtatgacaagaaagcgaaagaactgagggcagaaatcttaaagatgttatatgcctgccagtcaggacatcccggtgggtctctgtcctgtgtggaaatgctgatggcactttattatgaggtgatgaaggtagatcctaagaacccaaaagacccggaccgcgaccgttttgtgctgagcaagggccatgcatgccccaccctctacgcgattcttgcggacctggggtatttccccaaggaagacctggccgggctgcgccagattgacagccatttacagggacatcccgactgcaccaagactccgggcgtggacatgaacaccggctccctgggacagggcgcttccctggccatgggcctggctctggctgcaaagcatgcgggggcagactacaaggtatacacagtgctgggcgacggcgagtgccaggaaggcctggtatgggaggctgcaatggcggcggcccactacaagctggataacctgacctttatgctggattacaataaactgcagatcgacggccgcaacgacgaagttatgagcctgggcaacattatgaagaagttcgacgcctttggcttcgagtgtttcgaggtggacggccatgatatggacgcgattgtgtccgctctgaaggctcccgtatcgggcaggccgaaattcatatgctgcaacactgtcaagggcaagggcgtttcctttatggaggaccagttcggatggcacggcagccccatgaacaaagagcagtttgagaaagcgttaagcgagcaggaggtggagtaaaatgggaaagtcattacgtgttgcatacggtgaagctctggttaaattaggagagaaaaatgataaggtagtggtaatggatgccgatctggcccatgctacccagaccggtatgttcaaagataaatacccggagcgtttctacaacatgggtattgcagaagctaacatgatgtgtgcggcggctggattcgctcacaccggctacgttccttttgtgagcaccttcgccctgttcggcgcaggacgtgcgtttgaacagatccgcaattccatctgctataccaactgtaatgtaaagttcggcttttcccactccggcctgtgtgtaggcgaggacggcggaagccatcagtccatcgaggacatcgccctcatgagagagctgccccacatgaccatctttgttccctgcgatcccgcggagacagagaaggcggttatggctgctgctgagatcgacgggccggtatatatccgtgttgccagacctgtctgcgacgatatcaccacagcccacaccccattcattcccggcaaggccaatgtgatgaaagagggaagtgacatttgcttaatcgcttgcggcctgatgattccgagggccctggaagcggcggctgagctggaaaaagagggctcaagcgtggcagttgtgaacatgcataccatcaaacccattgacaaggacattgtgctgaagatgaacgagagctgcaaggccatcgtaactgttgaagagcactccgttatcggcggccttggctctgcggttgcagaagttctggcaggccacaacggcgccaagttcgccatggtgggcattgaagacaagttcggcaagtccggcaagccggatcagctgttcgaggcatatggcctgaccgctgccaatgtggctgcaaaggcaaaagagctgctgaaataattggggaaaatgactgtggaggattaagaaaatgaccattgcaaattatgagtttaccggcgaaggtatgcagagagtattcgaaaacgagagatggactgtgggaatcaagaactggaagccggccaatgatgtaacaggaattgactgcctggagcgccacaacaagacggacgagctgtttgtgctggtggaaggcagctgcaccctgatctacgccaatgaagtggaaggcgggttagcattcggcgcagtaaagatggagaaggataaagtctacaacatcccctctaccctttggcacaacactatcacccaaaaggacaccaagatgatcttgatcggggattccagcacttctatggaaaacagcgatattctgaacctggttgcagctcagattgaagagatgagaagcctctggagcagatgactaaacatccgctgacagacacaggaaagctaggataaaggataaaacccgatattataaaaggaacacagtgctgtggtttaggaggttgtgcgcatcatgtgcagggaacctgacgcgtaatggttgtcaggatgtctcgcgccttttgaaagaaatcctggattgccatgaacaaccggatgtcgcaaagccgatgataaacagtatgatgacaagattctggcaagggtcttgggaaagggaaggatagatgacaaaagaggaaataaaaaacctgtttatgcagggaattgactgttcacaggtagtggcaggtcgatttgcagatgaattggagatggaggaaagccttctcaggaaaatgtctgcctgttttggcggtggaatgcagtgtggtgaaacatgtggggcggtgaccggtgcgttgatggtaatcggtctcaagtacggacatagtatgaataacgatttgaaacaaaaagaaatcatgcgtgaaatgacttctgagttcaagcgtttgtttgccgaaaagtacgtttcttgcatgtgcagggagctgctgggacacgacatatccaaagcggatgagatggaacaggtgttggagcaagggctgctgttagatttctgtccatgtgttgtgagggacataatagaaatactggagaagatgatatagatgcggcggacaaaggagggataatatgccccggataatgccaattacagacttaagaaaaacaaatgagatttcagaaatctgccataaaagccaggaaccaatctttgtgacactattacagaggcgttaagcggattgaggagaaggtatgcataataaaaatatacagtagaactgtttcatcgggccctgagagattttgaccgtatctaccggtatatttacgattatctttgaggcatatacattaggactattattagagaaaatagaccagagaggaattacaaggtgagagtagaatgcggcatctgttatagaacaataataaatgtggaggtggtaataatgatgaggaattgtggtttggataagaagtagagtgcattaaccacgagatatagcggttttggctgaaaaaacgaggggaaaaccgggcaaaaaatggccggttttcccctcgtttttttgccttttcatagatgtgagatggggaaaagaggatgtggagtaaaatctcaggtcagccagattgaaaaatggctggtgcaggatgacttggttttacgatattctgttggagaatatccctttagtttatgaaacaggcggctgaaatacagctggttatcataccctacgatgcgcgatatttcattgactgcataatttgtggtttccaataaagtttgtgcgttattgacgcggatagaaacgatatattgtaagggtgtggagcctgtatattttttaaagttgcgaataaaccaactgacactcattcctctggatgaagcatattcctctatattaatctcccgattataattttccataaagtaagttatagcgttatctatttcgtgaatcatatagtcattttttaaggtatgttctttggttaattcccgctggaaaatgatcaataaatggcgcaataagagcgtcatcatttcttcataattactttggcatttttgcaattctaatatgatacgtttgaaaatttgttcatactccaaagcagtacctaccggaaagattctgcggttgtctgcgaacccatattttcgcaagatattttttatattatttcctgtaaagtgaatccagtacacctcggttttatcttcaccgtagtattcatatttttgaaattcctttggacggtataaaacaatattgccggcatgaacgatggtttcattttccggtttgtcgaaatgaaaatggccgcatccggaagcaacgtagatgatttgaaaatccaagcgcccccgcggacgataggttggtaatttaggaagcgtagatagtctgtatgtgccgcagcttccaacaatcagtggttggcttttgtctttgaagtcgagatgagattgatttaagtaaccgttgttcatatacatggcggagaaccccctttaaaataagtgatgacgctgccttttttatattgtatcattttgtgcataaaatgtctattccggtttatagacatattttgaatactgacgtatgattacagtaacaaataaagcgcagccgatgaaagaaaatttattgtgtgataaaaagtgcatattcaaggagggaatttatgatcgtaccacgttattatgaagatttaagcgtgctgcatgaaaacacaatgccgccaagagcgtactacatgccggcatcaaaaagaatggatgatttgacagagcatagagaaaagtcagatcgtttgcagctattaaatggaaactggaaatttcgttattttgaaagcatttacgatgtgaaggaatcgttctacgaaacggattatgacgtatcagattttgatgaaatgagagtcccaggcatatggcaaatggaaggatacgatatgcatcagtacacgaatatccgttatccatttccgtttgatccgccttatgttccgcaggatattccgtgcggagcttatgttcatacatttttttaccagagtgaaaaaacggcgccaaaagcatacctgaattttgagggagtagatagctgcttttatgtctggttgaatggaaaatatgtaggatacagccagatatctcatgcagtgagtgaatttgatgttacttcctttttgaaagatggagagaatatcattgcagtgttggttctgaagtggtgtgatggttcgtatctggaagatcaggataaattccgaatgagtggaatcttcagagatgtgtacattttaaaacgtccggaacgggctgtgtgcgattatcgcataacgacagaggtttccaaagaagtcgccaggataaagttagatatacagttttatcagccgattcatctgaacataagagttgaagataaaaacggagctgttgtttctcaagggacgatagagaaagatggaatcatagaatttgaaatcttttgtccggtgttttggaatacggaaaatccatatctttatacggtgattctggaatcgaaatatgaagtgattgtggatgcggtagctttacgcacgattgaaatttacgataaagtgatttatttcaacggtgagaaaatcaaattccgcggtgtgaaccgtcacgattctgagccggaaacaggagttgtgggtgcaaaacagataaagacggatatgatattgatgaaacagcataattttaatgcgattcgttccagccattacccgaatgcgccgtatttttatcagatgtgcgataaatatggatttatagttattgacgaggcggatattgaagcgcatgggccgttcatgttatatcggaaagaggataccgattataaccgctttagtcgctggaatgagaagatagcggatgatccggcttgggagcagtcgattcttgaccgtgtacagcgtatgattcagcgggataagaaccgtttttgcatcgttatgtggtctatgggaaatgaaagtgcttatggctgcaattttgaaaaggcactggagtggacaaaaacattcgatcccgcaagacttacacaatacgaaagcgccaggtatcggaattataacgtaacctatcagtaccataatctggatctgtatagccgcatgtatccggcactggaagaaatagaggaatatttggagaaggatggaagtaagccatttctgctggttgaatattgccatagcatgggaaatggccccggtgattttgaagattattttcaaatgattcagagcgatgaccggatatgcggaggttttgtctgggaatggtgcgatcatgcgatagcacatggaaaaacggaaaatggaacgcctatgtattattatggcggcgatcatggagagagcatccatgatgggaatttctgtgtggatggactggtttatccggaccgtactccccataccggacttctggaatataaaaatgtgtatcgtccggcaagagttgtttcctatgatttggacagcggagagttgattttacacaattatatggattttgatgatctgaaggactatgtggaaatttcttatgaagtgacgcaggatggcttgattattagtaaagggaaattgcccgctttttcagtagcgccccaccaagagggaaaaacaaagctggagctttctataccggggaatgggaaggtttatttaaaactaatttaccggttgaagaaatcggctgctcttttggaaaaaaatcatgtgctgggctttgatgagatacagctttctggcagccacttaaaaacccgtcaggcagaacagtggttaaacagaattgcagagggtacagaaatccaagtaaaggaaaaagacactcaaatcgaaataaaggcagccgactttgtttacatcatagataaacgaacagccctttttgagcaaattcagtttgccggaagaaattatctgaagcgtcctatggaactgaatatttggagagcaccaacggataacgatatgtatatgaaagaagtctggaaaaaagcccattaccatgaagcatatacgagagcttatgatattgaggtttgccagaacagaaatggtgtggaaattttggcttattcagcgatagtcgctgcaacagtgcaaaaaatcatggacgtaaaaatcaagtggatagtagacgccagcggaaaagtatcttctgaatttacagtgttgaaagatggggaatttccagaacttccgagatttggtttgaggcttttccttgataagagcatggaaaatgcctgttattatggaatgggtcctcaggaaagctacagagataaacatagagcagcgagtcatgggctttatcggtcgaaggtatgtgacttacatgaggattacattcgcccgcaggaaaatggaagtcactatgactgtgattatctggagctttctggttcacagtatggaattgcggctgttgcaaagaagtccttttcattcaatgcttcgcattacacgcaggaagaattggaaagagctgcgcataactatgaattatgcgcagctgacagtacaatactatgtttggattatgcattaaatggaataggatcgaatagttgtggccctgttgtcctggagaagtacaggtttgatgaaaccgagtttcagtttggacttactctggttccatttgtgaaaggcacaaagtaacaacggtgagcagccataagacaatgaaaacatctaaaatcgctgcctggcattgaacgttcaggcagcttcgggaaggagcgtattatgggagaaaaaacgtacttgaagtggtataacaaagtgggatacggatcgggtgacattgccggaaatgtggtatacgcatttttaacatcgttcgttatgatttatttaacagatacgattgggctggcatccgggataatcggaacactaattgcggtatctaagatttttgatggatttacagatattattttcggttccttgattgataaaacccatacgaagctgggaaaagcaagaccctggatgatttatgggtatatcgggtgtgcaatcacactgatcgctgtgtttgcagttccaatcagttggggcaaaacagcacagtacgcatggttttttattgcgtatacactgctgaatggagtgttctatacggcaaataatattgcgtattcagccctcacctctctagtgacaaaaaacagcaaagaacgtgtacagatggggtcttatcgtttcatctttgcattttcaacgagcctgctcattcagtctgtcacagtgatcttcgtggatttctgtggtggaggcgccgaagcatggagaacggttgcaattatttatgccgtgattggccttattgtaaatactatttcagggctttctgtaaaggaacttccagaggaggaattaatttcagcggatcaatctaaggaagaaaaatacagtgccgttgatgcgtttagactgattattgcaaataaatattacctcatgatttgtggagtctatatcttacagcagttgtacactgctatgatcggagcgggtatcttctatgcaacatgggttctgaagaataaaaatttgttcggagtattttcgtgggcagtaaacattcctttgattatcgctctgattttcacgcccacattggtaggaaaatggaatggaatgtataagctgaacttaagaggttatatgctcgcggtggctggaagagccctggtagttgttgcggggtatatggaaagtgttccgttgatgctgctatttacagcggtggcagcgtttggccaggggccttggcagggagatatgaatgcagtgattgcatcttgttcagaatacacatatctgacgaaggggaaaaaggtagaaggaaccatgtattcctgtacctcattagggattaagcttggcgggggtattggaactgctgttgtaggatggctgcttgaattaagcggttatgtaggaacggcagaaacgcagccggaatcttgtatcagtatgcttcagtttatgtatctgtggctgccgctgatttttgacgtgcttattatgtttgtcctctccaggataaatgttgaggaagcaaatgataaaatccgggcgaaaaaaggaatggtatcaggaaatactcagtctttttgataactatgcgcgatatatatggttaaaatagtcggcgtaaaaagttaaaaggatattgaaatactgtttaagcttactcattttaccttcctccttgttcttggttatgtgtttattatatgacaggagaaataatattgcttgccaaaagaaaagaaagaatagccaaattttgcagtagatataaggtgacaatgcagaatcatgagcaagggagaggaggaatttatcagtgcatttatcatttgtagatacggaagaagaaattctggcagtaaaaagagtggcaagacatgtatctccacatctgcacaatgctttggaaattgtatgggtaacagagggtgctttggaattgggagttgggcaggaactgtatcatatggagaatggagatataggttttgtatttcccaatatcattcaccattatcaggtttttacggatagggagagtgtggctgtttttataaaatccccgccgtttgttttgagtacttttgatgagatattgctaaactatgcgccggaatatccgataataaaagctggtgacgtggacagagaaacgtatcgtgcgcttggggcggttatgaaaacaaaacagacggaatttgcgattgtacaagcatatttacagattgtcctggcaagatgtatcagaaacttcaaattagtagaaaaaagaagcgttggaagcgatgatctcatttaccagacagttgcctatgtgtcaggcaatttcaaaaatacgttttctttagaagatatggcgaaagacttaggggttagtaagtatgttttatctcgcattttttcaaagacgtttcatagtaattttaagcagtatctgaatgatacgaggttagattatgctcgtcgccgattggagaacacggaggattcgattactaatatctgcttggacagtggatttgatagtcagaggacatttaaccgagtgttcaaagaaagattccgggtttcgcccactgaatatcggaaaagtcagaaagagaaagtgaagctgctttgacgagctgttttaacagaaaagagatagctggataaagagcggaggtaaaagcgcttgagtgccggaagcccattcccgggcttccggctccttcgttattataggaaatctatcctatcttattctttattcttccaattcccgtcaaagatacccccagcagataaaccgcgcatatcacaaagaataacacggtattctgccccagcacatcctccgatttgttggaattcatgcccaggagcatctgggaatagggccacaggagtccggccttcgtattggcggcaattatgcctgtaacgccgcctgccaggccaacggcaatgggagtggcaaagcttcgtatttccgtggcaaccagaaactgcagggcggcaatcacaaaggctccggccagtccgcggatcatccagaaacagagatcgccgggcggcagatccggcaggccaatgacttttccggaggcgaaaaagagcagggcaaaccatatctgtgtcagtccggaaatagcgcataccaggatgaacttggacaggtagatggtgtgataggataccgggcaggcgaacagggtattccggcagctgttaaaattctcatatctccataaaaacgcgcagtatgcgccgatcaagggagcaaaaaagaatgtggcataaaataatgtcacctgagtccagtaggaataccatccggattttaacaaatcaagattggacaggtaatttccggcgccgagcaggatggggatgacaggaatcagcagaaaggccggccatatcagggttcctctgcatttcatgcgttcacagataattgcttttactatcatcagttattcctccttacatggtttcacggaccgtttctaaaaaatgtttttggccgtaacggtacagaattatgattgccgcagccaggatggccatccagaagaaaggatacgtattccagctataggcagtgtagcgcgtggactcatcatatgcatatcccacattgcacagcgatgcataatatccccacggtatcagacagcgcagcggccatctgtttaaaaaccaggagaacagcccggtaaatgtgcctcctatgcttatgaagatgggtgtcagctggttggtgaacttgagggagaggttcagctgaaggataaatatgcacagggaagtcagacatatggttgtaaaatattccgtcagatgggacgcggcccctccgtcatatgaccgtgaaacagcccagaacaggagtgtctgcatgagtgcaaacaggatgatataaaaactgccggccgctgctttcccgcggtagacgtgttccggtttctgcatggtacagatccatttgtaagtatttcccatctgttccatatcacacatccggctggccagagcagccagaacaatagggcacaggatggtgttcatcagaagcagattggtaaacagcatagcgctcgcatcgttcaggcgtgtaatgtctaaatcgtccatgcaccagcacgtccaggccgtgatgagggcaaatatcatcaggaacagaagcgggatatgccggcggcgcagcttgcgcatctccaggatgaattctgtttttatactcatagtcccgcctcctttaccatactgaggtagatatcttccaggctctgccgcttctcctcggcccggtataaatcaatcccatgattcatcaagatgtggaatatctgtgccagcatatggtcgggaaggaaggggaggcggatgccgtcagcagcggagtaacagaacccgtccgcggcgtcattccctttcagaagcagggcggcacggtcctcattttcccgaagcagtgcagagagctccccgttttccctgagcagtgcggcagcgcctgtgtcatccgaggtacgcagataaatctgccgggtgctgcgcgcctggagcatggacagggcatcctggaatatcagccgtcccctggatatgatgccgatgcagccggcggtctgttccatttccgccaggaggtggctggataccattaccgtcattccaaactgttccggaaggcttttaatcagctcccgcatctcgtgaataccggctgggtccagcccgttggtgggttcatccaaaagtaccagttttggggagcctaatagagcatttgccaggccaaggcgctgcttcatgcccagggagtaatgcgcggcctgtttctttttctgaccatccaggcgtacgatggacaggacccggtcaatctccgtgtaagggagacctctcaacatgcagctgatctgaaggttttcatatgcggtaagattaccataataggaaggagtctcaatcagggaacccacctgtctcaggatggaaatgcggctgtggtcattcagttctgtgccgttgatgcggatgcttccgctgtcccggttgattaatcccaggagcattttcatggtcgtgcttttgccggctccgttaggacctaaaaatccaaagatggagccctcgggaatgcgaaggtccaggtggtccacggcgggagtgccgcggtaggtctttgtcagctggctggtttcaatgatatattgtgccattttgatatcctccttgtctgcgattaagcggcatacggcataggtcagagcctcatccggattttctgctgctttctctaggattcagaataacgcggcctccttatgcctgcctttctccaaccttaaatttaccttaaatgattcaaaaaatgattccctgttccgctaaatcagctataatgaacccaaaggcaggtgattgggatgaagcttagggaagcgcgtattttagtggtagatgacagccgggagttgtgcagcctggtggagagtatttgtgagcaggagggcttttcccatgtggagacagccttttcctgccgggaggcggaagaacggatagaaaacggggctgctgacttcctgattctggatgtaaatatgccctttgaagatggattttctttcttccagcggattaagacagtgctggaaaagcagaggattccggtcctgtttctctccgcacgggaccaggacgaggaccggctccagggattggatctgggggcggatgattatatgactaaaccattcctgcccagggagctggtactgcgcatctcggctatcttaaaacggacttaccggctggaggagcagacggagtgttacaggctgggaaaacgggaggtggatttgtccgcgggggtggtgaggttattggacggatcggggagaaccatttccctgacaaataaggaatatcagcttttgaagctgttcctggaaaaccgcggcaggatcctgacatttgatgttctgtcggaatcggtctggggagagaattatttcgattatgagaatacgctgatggtacacatccgtaaactgcgggaaaagatagaagagaagccgtcggaaccggaatttttaattactgtgaaaggattagggtatcggatgaacagatgaaaagcctgatgaggatttattttagttatattgcaacagcgctggcaatcattgttgcatttgtcgtactgcaggttgtattgctgggcatcgtcacctccaagctttatgaaaatgagagcggcgggggaaagtatgccattgcccgggtataccaggcgatggacggagacgggctggaagctgtggcctgcctacaggagatgggggcctcctttgccatgcttttagatgatacaggaactccggtctggaactatcggctgccggagcatttaaaccacacatacacaacctcgcaggttgcctctttcacacgctggtatctggatgactatccggtttatgtatggggaggggaaaaggggctcctggtaatcggctatcccaggggaagtatgtggaattatgctgttcatcaggatatggataatttaaagggagttttcacattcctgtcgctaagctttgtcagtacgctggcagcctcggtcctgattctgctggtatccggattccgctactacaggcggatgcggattattgcggatgccattgggcagcttgcatctggcggaagcgcccatttggcggaaaccgggaccatgaaggagattgccagtaccatcaaccgcacctctgaccgtctgacagcgcagcgggagcagctggagaagcgtgatgaggcgcgtacagaatggatcagcggggtatcccacgacatacgtactcccctgtccctggtcatgggctatgcggatatgatagagcgtcaatccgatacagatacgcggatcaggaaaaaggccgccttaatccgttggcagagtgtccgcatccggaatctgattgaggatttgaatcttgcatcaaaactggagtataatgcacagccgctgcgaaagagaaaggtgtttctggcggtaattctgcggaaggttgctgcggatttgctgaattccatggagcaggcggagcgttatccgttgtccatctgcattgaacccggatttgaaacattttcgttggaagcggatgagcagcttctgttccgcgcattccgaaacatactgggcaattcagtccgccacaatgaagacgggtgcagccttggggtgcgcgcctggatgaaagacagtcgtccccatgtgcagttttatgacaatggccgcggcattcctccggccatctgtcattatctgaacggggggcagatgccggaagaaaatgtacatctgatggggctgaggattgtgcgccagattataggggcccacgggggcaccatctgtaccagggaggatggacatgggattgagattcgattccaggcgctcatatagcgagagaaagtaaatggaccgcgtaatcgataggcataatccgaaaaggacttgacaacggtgctataatgtagttgtaacataataaacttacttaacacacctatttgtttatcaaatttgaaggctgctaagcaatcagaattttggaggaaaagataaatgactactttaaaagctgaaaaaagaagcatgtccatcaaagcaaaacgattgagaagagagggtttcgttactggaaatatctttggcagggaaattcccgaatccattcccattaaaatggagagaaccgtggcggaacggctcctaaaaacctgcaacaaaggcagccagattctgttagacgtggatggacaggtgtttgacgtcctgattaaagacatatgctttaattcaatgaaggggcttgttgaggagattgatttccaggcgcttgtaagcggcgaaaaagtccattccgtggcggagatcatccttttaaaccatgataaggtgataagcggtgttctgcagcagcggattcaggagatttcctacaaagctttaccggatgcaattattgacaaggtaaaagtcgatgtaggagatatgagagtcggtgatataatccgggtaggagatttggatatcgcgaagaataagaacattgagcttgttactgatttggatacagcagtggcaacggttatcgcggtacatgcggcggcggagacggcggacgaggctgctcctgagacaaagcagaccggaaacgttttataattaagtgcaatagaaaaatgacagagtataggcgcttaggaactttatgttcttaggcgcccttttatgcatatacggaaacagcgcccttcctcaaacaataccacaattttaaccgttcttccattttcgcctcacatgccgccggtcgtacaggccgtaatggcttaatgttccagcaccaggagattctcgcttgtggatgcccgccatctccctttcttcctggctgcggggaatccggtttgtgataaggggtctcctccacgcgcttccggagtgcgctgccgggcagcctctttcaggaccggtatgggattgcggctttcacgctggacacgcccgatgtttgcgcctgccgcagtgccgcctgcctttatacggcgttttgtcatggcggcattgaccgcataaccgcctccggcacaaactgggctttattatcggattcggaggcgccttcagctccgaggggctccagaaggtgatttccctgattcccgcatggctcagcgcgggtctgggcgtggcaggcaagatgcttcccgccattggttttgccatgattctcaatgtaatggcaaagaaggaactgattccatttgtactgttcggctatatcgccattgcctacctgaaccttcctgtcatgggagtggctgtaatcggtacggccattgcgctgcttgtatttttccatgccggcaaagaaaacggcgaatctgtagaagaagtggaggttgaatttgaagatggcatttaatcagctggagaaaaaagattatatgaagacatccctgcgggcctatttcctgcagaatggatttaactatggcaattaccagggtcttggctatgcaaatgtgctttatcccgccctccgcaagatgtacaaggacgacgatgacaagctccaggaagcattgaaggagaatatagagttttttaacagcaatattcactttcttccgtttatcaccagccttcatctggttatgctggagaataagactccttccaatgaaatccgcaacatcaaaatggctctcatgggacctctggcaggaatcggtgattctcttgcccagttctgcctggcgccgctgtttgcaaccattggcgcgtccctggcccaggacggcctgattatgggccctatcctgttctttgtggccatgaacgtgattcttctggccatgaagtttctgaccggcatgtggggatacaagctgggcaccaacatcatcgccaccctcagcacgaagatggaacagatatccaatatcgccagcatgataggcgttactgtcatctccggccttgctgtaaattttgtaaagatttccacaccgattcaatacgttgccaatatgacgggagaccagcagaaggtggtggctatccaggagatgattgacgccattgcccccaagcttcttcctgtattgttcacaggacttattttctaccttataaaggtgaaaaagtggaccacttataagctggtcatccttaccattatcctgggcgtggtgctttctgtcctgaatctgattgcttagagtgtatcaggaaattgctttgggacacactcaaaaaagcggggaggtaccctttgacatgtatgcctgaagcatgcagcgggggcgcctccctctctgttttatgaatgttaacgggaacaggggatgaagcagcccccctgaaatgagagaaagactgaacggcataaaaaggagttatctatgcatgatgaaaggtatgtacatgtaagacaaagagcagaggcctacgaggcctggtatgaaaaggaacatgtgtgcgcccatattgccggaaactgccgggaggaggcggagaaaattctggcgcaggcagacaggctgatggcgcatacattttcgtttgaggacagatgggatatggaaccctgccgtgaaccatttacccttaaggaaatgatatgggacagaagccccaacggggatccggaatggattttcatgctgaaccgtcacgagtacatgaacaaacttcttattgccggctggcttaccggcgataaggcatatgtggaaaagctgaaatggtttctgttccattggattcaggcaaatcccatacttcctgaaggaaccgtgaccacccggaccattgatacgggaatccggtgcatgagctggcagtatctgctgcttcatcttctgggagagggccttatggaggaaagagaagccgcaggaatcctggagagcatgaaagaacagtttgccagcctgaggaaaaggtacatcggaaaatatacactcagcaactggggcgtccttcagacggcgtccatctgcaacggatacctgtggtttcacgaatatttaccttcagacggaactgaggactgggcctggcaggaactggaacgtcagattgggctccaggtactggatgacggagcccactgggagcagtccatgatgtatcatatggaggtgcttcttgcctgcatgaagctgctggcctcctgccgggcttgggtcaggattgaaaacaggacggaattttggcgcgatacagactggctggagaaggccgttgacaggatgagccgttatgtgcttttcgcctcgggaccggatcatttacagatagcccaatgtgacagcgatgttaccgatgtgagggatgtgatggtgaaggcggctgtccttaccggggacggcaggtacaggtatgcgggatatgataccgcggacctggacagtgcctggatgtttggaagcgccggagtcaccgggtacagtgccatggcgggcaggaaaccggagagcctgtccctggctgcagcggatgccgggcatatattttttagaagcagctgggaggaggacagccatttcacctatatgaaatgcggtccccttggaagcgggcacggacatgcggatttgactcatatatcgctgcattacagaggctgtcccatactggtggacagcggcaggtattcctatgtggaggaggaaccgctgcgcccgtttctcaaaagcgcccaggcccacaatgtatgtgtcatagacggagagtctcatggaaggcccaggggttcatgggggtatgacagctttggacagagctttaaaaattattacagggaacagggcccggtccattacggggaaatggcttatcacggatgtctcatgtccggcgcgcattatctggtcatccgcaaggtgatggcggtggaccagggaatctggatgattgtcaatgatatacgctgcgatggcggtcatgaggtgaaagagtattatcatctggacagtgccgtacagggaacccccattgggacaggaacggacggggccggggaatgctggagactgtgttccggcggggatgatgcaatgacggtgctgggctcccgcccctttgaggcagtgccctgcgtcatatccaaacagtataaccagaaagagaaaagcacctgtctggttaggaaaaccggatttacagaccgcatcacagactggacctgtctgtttggagaagggacagaggctgagaaaacccaggttttccagtacggaagcagccggccggagacggaggaacaggtgacggccatgagcttttgcctctcgccggatgaatcctgggatttcctggtgtggaatcaggaaacgtgggcagggcggtaaaattcacgattgcagaggggtgccggtttatgccaaggcagcggccattcacaccataaatgggaacacgacactttaccgattgaggatttaatggtatatttataagagcgatgcaggatgaggcggggggaggtcagaatgaagaagttgacaattaatgagattgctgaacgggcgggtgtttcaaagacaacggtgtccttctatctcaacggcaagattaataagatgtctgaggagaccaaacagagaatacagcatattattgatgagaccggatatgagccaagtgctgcggccagagccatgaaggccaagagcagcggcgtggtgggggtcatactggcggacacgtcggagggatactgcgccagggccctcaaaggaattgaggaggctgccagcgccctggaataccagattgtggtgggaaacagcggtctggccttccagcacgagaaggattacgtggaacgcatgctcaggctgggagttgacggttttatagtccagtccacctaccgtttcggcatgctggcctcagacctggaaaaaaagaaaaagcccatcgtatatctggatgccaagccctatgatttcaagggacggtatgtgaaaagcaacaattatgactgcgtgtaccaggtgatttcggaatgcatcaggaagggatatgagaaatttctcatgatttcagacggtgattccaacatcagcgcaggttttgagaatacccagggatataaggatgccatacaggacgcccggaaggagggtgccacccagtacctgcaggagggcgtaaagtccgaccaggtctacgaaatgctgaaggaccagataagcctggataaaaagacgctgatttatgttgccagtccgggacttttgcaggtggtgtaccaggcgatccgcaggtacccggactatatgaggctgtttccggacacactgggcctgatcggatttgacgcagagggatggacccggatgactaccccggccatatctgccatcatcacgcccgcttatcaggaaggggtcagagccatggaagagctggctgacatcctggacggtaagaaaacagatggggaagtggtatttaagaatatagtcaagtggagggaaaccaccctttgacattttaatgtaatatgagtctgtgaaatgacgatgtccgtgtgccgggacatctgattggatgatatgggagccggtataaggaaacttattttggctcctgttttttggaacatatattattttgcggagtccctcttcattgcgcggcagcaggaatcatgatatgctttaacacacggataaagaccggaaaagaggaaatgagaaaggcagtattacacagagctattaaaaaagacatttgacctggaattaccaatggcgcagctgctggaagtacccaagatgacggtactggacgatgaagggactcttgcaggacttcctaagacaggagaccagaatcaaaggatggtgcaggttttgatatgtgatattatattttgtggattgatgtaaaatcaacaggaatccaaagtttggaaaatgcaatcaatctcgggatggaaagaagtatgcagatatggtacaatatagattatatgaggtaactgggtcgaatgataaagttgacttattcacgcctggttggaggaattgggaatatggttaaaaactatacgataaaagatcatctggtttcagaagctgattttagagagttatcgggcaaagcgtcattgaacgagaatgacgggatgatatatatattaccagagtttactgatggaaaagatattataaatgaatttgcgtttgatttaaacaggttcgccaaaagcgaggacattccttgtaccatggtatatgataaagataattttgaatacttggcatcaagggattttgatattttgctaccctttataatcagtctgtcagcgtccgcctgttatgatttgatgaagtactttgttaagaaatatttttctgataagaaaaaagtgaatgtgagaatgattataaaaaagaaaaaagatacaagctatcgtaaaattcagatatcgggagacgcagaaggggtaatttgtgcgctggatattttgaaagaagaagagaaggaaatatagaacgtttgaattgtttttacgtagagatggcccattatgtcagcgaaattgactgcagggaatgtgctgaaaggcattcaatatataaagattgtatttggaattcgtttataactgcggcctcctatgaagcttttaaagggaggaaccgttttgtaaaggtaattgactggcttgaggatttgcatgaattttcaaacaaagatatcagcgatatgaacagagagatttcgaatcaattaaaaactgttatgcaggagcgtttgcttccgttatgcagagagcataatatgtatgtggccagcaagaaagtagcaagatcagagtcagcatatgctgatgtgaaaagcgagatttatgagagttacagggaggagtttgaccaggatatagataaaacgtattttgattctgctgttaatatgctcttagctgagagaagatagtaaggtcagcagaggaagccgcctggatgcttccggaaaggataacatggggaaaacataaaggaaaatccccaatccctctgttgacacaaaaataagatgtacataattagggaggattatcatgccggtatttgatttcagcgatacacccaaaaaggaagaggagccccagtgcacctatacggtatactgctccggcgaggcggctgcctccccggagaagcccatgcttgttctggataacagcagccgggactggaagcaccattcctgcggcgtatttacaaatcaggccaaacggacggcctttgaattcaaggaggaggacgggaccatcagcgctgatatcctgcgggttgacgcacgcttcatcagtctgctgcgctggctgggagagaaccatatcagtgtccgcctgtccggccagaaccgcggggacggatacgcggtctataagattcgggaggtggcctttggcggcgggaccaagctttccgctgaagacggatttctccagtttatgattgacaggctgctggcaagcagcgcgccggagacggaactggcggaagaggacctggaggaaatcggggacgatatgaagctgaccagtctccagagtctttctgattttatgaactgcgccggcagaacgctgcctgacaacatacgaatctgggcccgccggaatctggcggtagcccgatcccatgaagtgactccggaggagaggcgccatgcgcagcgcgccctttccattatgatgaacatacagtggaagaaccactattttgagtccattgatccaagggaggcccggcggattctggatgaggagctgtacggtatggaacgggtcaagcagagaatcatagagaccatcatacagattaaccgtacccatacccttcccgcatacggcatgcttctggtgggtccggcaggcaccggaaagtcacagattgcctatgcggtagccaggattttaaagcttccgtggacgaccctggatatgagctccatcaatgacccggaacagctcaccggcagttcccgtatctattcaaatgccaaaccgggcatcattatggaagccttctccatggcgggagaatccaaccttgtctttattatcaacgaactggacaaggcgtcagcgggaaaaggcaacggcaatcccgccgatgtgctgctgaccctcttagacaatctgggatttacggacaattacatagaatgtatgattcccaccggcggcgtctatcccattgccacggcaaacgataagagccaaatcagtgcgccccttatgtcgcgttttgcagtgattgatattccggattatacaccggaggagaagaaaatcatattttccaggtacgccatgccaaaggttttaagacgcatgggactgcacgaaaatgaatgtgtggtgactgaagaggcacttgacgcggtcatagaaaaatacgcggacaccacaggaatccgggatttggagcaggccgcagagcatatggctgccaacgccctctaccagatagaagtggaacacgtcccagcggtggtgtttgacgggaatacggtgcgggggctgctggggtagggattattcctgttccggcgtgtatacaggaagcttattataaagactgccgggtgtgtgacgaatacaggagcggcagcgcgtgggaagcgcttcatggataaacagggagaacagagagggagtaatatgtattatacgacagattatgcatcgccggttggcgggattaagctggctgctgacggtgaaagactggttgggctatggctggaaggacagaaatattttgccggtactgtaaaagaagagatgactgaggaccgggaacttggtatttttaaacatacgaaggactggctggaccgctattttgcaggaaagaagccggtaccctcagagcttttgctggctcctccgggcggagaattccggcagggagtgtgggaaatcctctgtcagattccttacggccagctcactacatacggcgatattgcaaagaaaatggcggtgaggatgaacagggaaaccatgtctgcccaggcagtgggcggagctgtgggccacaatcccatttccatcatcatcccgtgccaccgggtagtaggcacaaccggcagtctgaccggatatgccgggggcattgataaaaagatatggctgctgaagcatgaaagtgcggatatggaaggcttgttcatgcctaagagggggacggcgctttaaggataagggtatgtcttgggaaaggttgttctgattatcgcagcacaaatggaccggcagtttcctgacggcccatctagtatgagaaaagttgtatgaaaagcattacgctttataaattaaatatagcatcaaggtatgaataagatatgaacaggaacgaatttttttgtattttatcaactgttttgccgaccattttgcccatacttttctgaacggttcatgaccaaagcatggatatgaattataatagaatatacagtcctataaaaagggattgacagcaaaaacaggatatagcataaagaaatggaacagacgctggctgccctcgtgaatgtggagcagcttataaaggaggcgggaggagacaggacgaatctgcggacgcggagggctgtggaagctggattacaaagcgccggcattcagtccggagctgatagaccgagatacatggggaatcttccgttacagggcgttcatgccgctgtcagacgagggctggcaggatattacccttggggagggcatgacaccggtcatccggttctccgagaatgtcctgcgtaagatggactatcggattctggaggcctgccacacagaaacgggtgcgctgccggaatcccggcgtgtccgtcagtgacatcatagatggtatgggaaatgcagaatattctacaaaaaataacagcttcccaataacactccgagattgtgcagaatccaaattcagtatataataagtatgctttattatgaatattggaggaagaaagaaatgacatttacttacccggcggtatttacgcctcataaaaacgataaaggctaccatgtaacatttccggatctgcagtgctgcgaggcagacggaccggacctggaggatgcggtggagcatgccagagaggcggcttacaactggctctatctggagattgaggagaaaacttttgagtttcctccccagacccatgtggaggatatcaggctggaggaaggggagtttctgaaacagatcatggtgacagtgaagctgcttccggataatgattgattttattgcctttttttacattaagtggtaggataaatcatatcgagttaagaacaactggtgccgctgtctgtcgctggcagactgcgggtaatagggaaacaggtggaaatcctgtacgatctcgtcactgtaagtaaggagcgcatggttcgtgtcaaggacagtcactgattcgtttgaattgggaaggcggtcatgcgtgttgatatacgagtcaggaaacctgccagttgttggtacaggaatatatttccagatcacgagtaattggttgtaccgatttacggtgtttcggccgcggatttctgactcagacggtaacggatttttacgcaggggaagctgtgcccggacggaaggggattccttcggagcatggatacgctgcgtattacatatctgcagaaaaacacatatctgctgacatcttccggaatacgcctatgcgcgtgcagactgccgtttgggattcgtcagatacaggcggcatattcctctacctttctttgaccgatggggttatataaaacaaggaggaaagagaagatgaaaatgaaaaaactggcagtattatttgcggcggcagccctgacaacggtgaccgcggccggctgttccggcggacagaaggaaacagccgcagagacaaccaaggagactgaggcagcggccactgctgaggcaacaacagcggcagagacggaagcagcggagacgacagaagaggccgcagaagcagctgccgaggcggacgaggagaattacgataccggggatgcatctaaggataataccaggaatcaggatgagatcggtgaaaatgaacttctggtagtcagctttggtaccagctacaatgacagcagacgtctgaccattggtgccattgaggacgctattgagaaggcatttcctgactttgccgtaagaagaggatttaccagccagattattattgaccacgtaaaatcccgggatgacgttgccattgacaatgtgggcgaggcccttgaccgcgcggaaaagaacggcgtcaggaatcttgtgattcagcctacccatctgatgaacgggcttgagtatacggatttggtcaatgaggtggcggagtattcggatgcatttgagaaagtggcaatcggaaagccgcttctcaccacagatgatgatttcagggcagtgatgaaggccatcacagaggcaactgcccggtatgatgacggcgagacagctatctgcttcatgggacatggcactgaggcagattctaaccaggtgtacgcaaaaatgcaggacatgctcacggaggaaggctataggaattactatgtgggtaccgtggaggcggcgccaggcctggatgacgtcctgacagcagtgaaggaaggaagctacaagaaggtagtactggaaccgctgatgatcgtggcaggcgaccatgctaacaacgacatggcaggagacgaagagggctcctggaagaccgcctttgaggacgcaggctatgaagtgacatgccttgttaacggactgggcgagctggaagcaattaaacagctctttgtagaacacgctcaggcagcggttgacagtctgacaaagtaaatcagaaagataaatgggcggtcggggcaatttgctgatcgcccttttgaaggtggggagattggaaatgaaattcaggaaaatgaacttggctgccctgctgcttgtcgtggggctgtccgccggaactctttcaggctgcggaaaggaggcgccggctgccgccgctgcagacattgcccgggaagccggttctcaggcagaggataggcagacagaggatgggcagacaggggataggcagacagaggataggcagacagggaatgacccggcagagcgcgcccgggcaggagacaccggaagccaggagacaggcagccggatggatgtagcgcaagacggaatggtaccggttctggcagatgcaataaaagatggggtctatgggattaaggtggactccagttccagcatgttccagattacggagtgtgaacttacggtgcgggatggagccatgagtgcagttatgaccatgagcggaaccgggtatctgaaactgtatatgggaacaggcgctgatgcagagcgggctcctgatgcggattttattccatttgcggaaaacgcggatgggaaacatactttcaaggtaccggtggaagcgctggacaaggggattgactgcagtgcgttcagtaagaaaagggaaaaatggtatgaccgtgtgctggtattccgtgccgactcccttccggcagaggcgtttgcagacggtaaggtggctgccgcggagagcctcaagctggaggatggttcctatacagtggcagtcaggctggagggcggttcaggccgggcatctgtggagacgccggctgcactccggattgaggacggcaaggcttttgcaaccattatctggagcagttccaactatgattatatgaaggtcgggggcgagaagtttgacctggtgaacacggaagggaattcttcctttgagattccggtcagcgcctttgactggaagatgcaggtcatagcggataccatagccatgagcgagcctcatgaggtggaatataccctggtgtttgattcaacgacaataaaaagggctgaatgatgagacgaaaaaagatagtgacggcggctgccgccgcaggaattctgatggcggtgatatgcgcaggctgttcgccgggcgggcgggctgagacaggacggacggcggcgggacaaacggcggccgggcagacaacggccgggcagacggcctcggatgaggatccggaagctgccccggaaagctggagcagcaaaaagataaccaggagtatggaacttctctatgcggaccagttttcagtggattattacgatggcggctacccgatgattaccataaaggacagcggccgctatctggtggtgccggaagggaaaacagagccctccggtcttccgggcgatgtggctgtcataaaacagccgctgaagaatatttatctggcggcaacatcagcaatggacctgttctgcagtctggatggaacggaccggattacactgtccgggacagatgcttccggttggtacatagaggaggccaggtcagccctggaggatggcagaatgctttatgcgggcaaatacaacgcgccggattatgagcggatattgtccatgtcctgcgacctggccatagaatccaccatgatttatcattccccggaagtaaaggaacagctggaacagctggggataccggttctggtggagcgctccagctatgagagccatcctcttggcaggatggagtggctgaaattatatgccgtgctgctgggccgggaggaacaggcagagcgctgttttgacgaccaggtaaggcagctgttacctgtgatgaaccaggagaataccgggaagacagcggcatttttctatatcagcagcaacggctatgtcaatgtgagaaagtccggggattatgtggccgaaatgattgccctggccggaggaacctatgtcccgcagggacttgcgggaaatgaaaatgcattgtccaccatgaacatgcagatggaaagcttttatgccgctgccagggatgcggattacattatttacaacagcaccatagacggggaactggacagcctggaccagcttttggataaaagcagcctcctggctgactttaaggctgtgaaggagggaaatgtgtggtgcacggaaaaaagcctgttccaggaaaccatggggccgggggatatgattctggatatccaccggatactgacagagaaggatccggagggattaaggtatatgcaccggctgcgctaggggggcgtctgaaaacgcattcccgcccggcaaagatacatggcggtcccatgggctgccggaaaaaggagttatgccaatgccaaaaggtatctacacaaaatacagcatttcatttgcccttttggcagccatgatgtgcgtattatttatctggaacattaattccggcagtgtgcatctgtccgtggaggaaatcggtgaaatcctgctcaggagaaccggggaggacacctcataccacattgtgtgggatatacgccttccccggattctttcggctgtgatactgggcggagccttatccgtatccggtttcctgctgcagacgtttttcgcaaatcccatcgcagggccatttgtgctggggatttcatccggcgcaaaactggtggtttcctttgtgatgattgtcctgctgggaaggggaatctccatcggctcggccgggatgattctggctgcttttgcaggctccatgatttccatgggatttgtgctgatgatttccggtaaggtaaagaagatgtccatgctggttatctgcggtgtaatgattagctatatctgttccgccataacggattttgtggtgacatttgcggacgacgccaacattgtcaatcttcacaactggtccatgggcagcttttcaggtacctcatgggagaatgtaagggtcatgacagcagtgattttcctggcgctgctccttgtctttctcatggcaaagcccattggcgcttaccaaatgggagaggtctatgcccggaacatgggggtgaacatcctgcggttcagggtggccctgattctgctgtccagcattctttcggcctgtgtgactgcatttgccgggcccatatcctttgtgggcattgcggttccgcacctggtgaagagcctgtttaagacggcaaagcccatactcatgattccgggctgcttcctgggcggcgctgtgttctgcctgttctgcgatttggcggccaggacggtctttgcgcccacagaactcagcatcagctccgtgacagctgttttcggcgcgcccattgtcatctatatgatggtgcacaaccgtaagaacatgcagtgagcgggaaggatggggaccgggcagcgggaaaacagaacagcgggagagacagagaggcggatttcatggaagaaaattacatattgactgaaaatatgaccgtgggatacggcggtatacctcttataaggcaaatcgggattcatgtgagaccaggcgaaattgtaaccctgattggtccaaacggggctggcaaatccaccattctccgaagcgtaatccggcagctggggctgttggaaggggctgtatatctggatggcacgcccatgcagcagatgggggagagggagattgcaaagcggatgtccattctgatgacagaacggattcaccctgaacttatgacctgtgaggatgtggtcagcaccggccgttacccgtataccggaagaatgggcatactgaccgcagaagacagaaaaaaggtcagggaggccatggaactggttcacgcatgggacctggcccggcgggatttttcggagataagcgacgggcagaagcagcgcatccttctggcgcgggccgtgtgccaggaacccagggccattgtgctggacgaacccacttctttcctggatatccggcataagctggagcttctgacgattctcaaggacctggttcatgagaagaaggtggcagtgcttatgtcccttcatgagttggacttagcgcagaaattatcggattatattgtctgcgtaaacggggaatacattgaacggtgcggtacaccggaagaaatctttacatcctcttatattaccagtctgtacggaattacgaaaggcagctatcatgccgagctgggctgccttgagatggaaccggtgaggggaacgccccaggtgttcgtcataggcggaaacggaagcggaatcccggtgtataggaagctgcagcgcatggggattccttttgccgcaggaatcctccacgaaaatgatatagattaccccattgccgtggcattggctgcaaaggtgatatcggaagccccctttgaactgattcgggaggagacgtatgagcgggcagctgcggttatggagtcctgcggccaggtcatctgctgtctgaaggatttcgggactgtaaatgagaagaaccggaaactggctgagctgggcagggataagccggaaccgtgcgggttttcctgaaacaggctccggatttcatttacggatgtaatgattagacgatatactgataaggcagggacggatataaagtttgaaaaaccaatggaggagcatctgaaagtatggtatgattctaccagagcgtgtctggaaactgcttttacgtcagatggcgggaatgaattttcagacacgctccgtaaaaagtaaaatgtcaaagcaggacaggtgaagttagaatgattacattaaaggaaatcgcagcagaggcaggcgtcagtatgaccactgtgtcgaatgtactgcatggaaaagcaaagaaggtttctccggaagtggaagagagaataaaaaagcttttggtcaaatacaactatatccccagattcgggctgaatgctctgaccaacaaggactctaaaataatcagtattcttgtcaatacgccggatttcgtggagcggaccccttacgaacgtcccttttacggaaatatcattggtgagcttgaaagcatgctgagaaaaagagggtattatatcatgctcttttcttccaagaacatacccgaaatcatgaaaatgaccatgggatggaatatggatggaatcatatccatctccatgccggccaaatattataagcagattggcaaacagacgggaaagcccattgtatccattgatatgaacgaatacgacccggcaaagatagcaggatgctttaatgtgacctccagggattatgaggggggcagacacatgatggggtatctgctggaccagggaattgaaaaggtggtgtacctgaccaataccaagtcgggagctgattactgctggtatctgggagcgtcggagttatacagggagcgcctgggagaaaacgcggccctggagatacatatgctgggcaggacctatgacgagagggccatggtttacgatgaaatgcgcaggctgattggacgcaggtccgcactgtttttttccacggatttcaatgcggtggaggccatcggttatctgcagcgcaggcagatttccataccggaggatatctctgtggcgggatttgacgatgatatatatgcaaggctctgcaatccaaggcttacatccatgagtgtggatgtgagccgtaaggcagagctggcggtaaatatgctcatgcgtcttatagatggagaagaggtgcgggagagcgagccgaaaattgatgctgtcatagcggagagggaaagtgttatgaaggtggaggagggactggactactaaaggggcggcaggccaaggcgcgctgtgcatatccttcttatgaaaaatgtaaatacaattggaaccaggagagggggagcttaagcgtccggattcccaggatgcccgctgcccgcctatttgagctggaagtggtacaaagttaagataaaaaaacaggtattttcagttaattggaaatacctgttttttttgcctgaggatgcagttcgggcttttgtccacccacagccggcttcacggctccaagagctaccgtgtgccatggcttttcgatgacgaggccttggaagtatgccgccgttttacaaggcttaagctgcgactgatgccttatctgtaccggatggcggttaagtcccatgagacaggtattccgtccatgcgggccatggtaatggaatttgacagggacccggcggcgcgctacctggatatgcagtatatgctgggagacagccttttggtggcccctgttttcagggaggacaatgaggtggagtactatctgccggagggcaggtgaacccatctgttatcaggggaatgcagggacggcggaagatggtatcatgatgtgtgcgatttctttaccctgcccttatatgtcagggagaacacgcttcttgcaatgggggcctgcggggaacgcccggattacgattatgcaaaaagagccgaactgaggttatatgcccttggggatggaaaagaagcggtatgtgagattccggataccgcaggcagcatcgtcctgacggccagggctgccaggaacggacgcaccattgtcatttccagcaccgggatgccggaggggatgacgtatgtactgaaaggcatccatgaggcaaaaggcatatcaggcgcagatgttttgggggatgacggcggaatcatcctggctcccggagacaacacaatgaccattgagttaaaggcggcatcagacgcacagcggttctaagaaaggtgcagaagcatggaagcattcagattattggaaaaacaggagtgtacaatcagggactcattctggagccgctatatatcgttagttaagaacacggtcatcccttaccagtgggatatcctaaacgacaggattccggattccgagcccagtcatgccattgacaatttccgcgttgcggcgggagatatggagggcaggttttacggccaggtatttcaggacagtgatgtatccaagtggctggaggcagtgggcaatgtactcatgctggagcgggataaagagctggaggaaaaggcggattcagtcatcgatatcatagccagggcccagcagccggacgggtatctggacacctattttatcattgaggaaccggataagcgctggaccaatgtgctggagtgccatgagctgtactgcgcgggccattttattgagggggctgtggcctactatctggcaaccggaaaagaaaaagtatacaatgtggcaaaaaaactggccgaccacattgacggcgtgttcggaccggaggaaagatggaggcggatgggatatacccgtgcgccgttgggcctggcactgcgcataccggggtggagcaggggatacagcctgcgtgtaaatggggaaaccgtatcagcggacagggaagaaaagggatttgcctgtctgatgcgctcctggccggaagagacggagattacacttaagttccgtatggaggcccggttcataaaggccagccagaatgtccgttacaatgcgggcagggcggcaattgtgagaggtccgctggtatattgtctggaggaagcggacaatggggcgtatctggaccagattgccgtggaccccaaaggcggactcgcagaggaggcagatttgtccatgccgggaggctgcatcgcactgaaggccaggggagtccgggagcttgcgcagacggatgcagatacactctacatgccttacgggtcatatgaggaagcggtgaccgtaaaggcggttccttattttctgaggaataaccggggaagaggagaaatgcaggtctggatgcggataaaataaggatagaaatttcattgacaccgcaaatgtatattgcaaatgggtgccgggactgggcaattcaagcggacaatacccgggagcctggctgaaggcccgaaaggcttacagccaatcatagatatttttaaagagtatggggtggaatagatgaatcagtggtggaagaaaagcgtaatataccagatttatccgcgcagctttgctgacagcaacggggatggtatcggggatttgaacggaatcacggctcatctggattatcttaaggaactgggaatcgatgtaatctggctgtctcctgtatatgagtctccctgtgatgacaacgggtatgatatatctgattacaaacatatattaaaagagttcggaaccatggaggattatgacaggatgctctgtgaagcgcaccggcgcggtattaaggttatcatggatttggtggtgaaccatacctcggacgaacatgaatggtttgtggaaagcaggaagtcaaaggacaatccataccgggattattatatctggaaagaaggaaaacgggacgaaaacgggcgtacggcagcgccccctaataattggggttccaattttggcggtccggcctgggaatatgacagcctgacagatatgtactatctccactgtttctctaaaaaacagccggatttgaactgggagaaccggacgctcagggaagaaatctacgatatgatggattggtggtgcaggaagggaatcgatggtttccgcatggatgtaatcagcatgatttcaaagcagcaggatttcccggacggagccgtaaaggacggactctatggggaccatcaggagtttgtctgcaatggaccgagggtgcatgagtatctgcgggaaatgaaccgcagggtgctgtccaggtatgatatcatgaccgtgggggaagcgctgggaaccaccatggagcatgcaaagaggtatgcaggtgaaaccgccggggagctgaacatggtattccattttgaacatgtttccctgggggaacgaatcatcggaaaatggaccgataagcgggtgcctttaaaggaattgagggacacgtttaatcggtggcagacaaggctggaagggaaggcatggaacagtctgtacttggataaccacgatcagcccagggccgtgtccagattcgggaatgactcgccccgttacaggacggtgtcggccaaaatgctggcgacctgccttcacatgatgaagggaaccccgtatatttatcagggtgaggaactgggaatgaccaatgcagggtttgaagtcctgtcagattacagggatattgaaagcatcaatgttaccatgagctgacggaaaacggcctgatggatgaggataccatgatgcgctgtttaaagacaatcagccgggataatgcccgtacacctgtgcagtgggatgacagtgataacggcggttttaccacaggaatcccctggattaaggtgaatccaaattaccgggaaatcaatgccagggcagagttggcggattcggacagcgtattccactattacaggaaactgattgcgctcaggaaacagcacgatatcatcgtatatggcgcatttgtgggccggctggaggacagcggttctgtttatgcctatgagcgccactgcaagggcagacggcttttggttgcctgcaattttacggaccagaccgttccctgtgatgcggcggaggagtttcccggcgctaaggagctgatttgtaattatgatgagcatgtaaagggcgttctgaagccgtatgaagcccgggttatattggggtgaatgggccggggaggactctgcttttaactgcagctctgtcacctgctcccccacatgcttagtggtatggacatcaatccacagcagttcctgcagcggtccccggatgttcatggaatgttccctggcaaaggcaaggagctggggcacataggtgcgggtccggcgggggaccagtatgcccagctccagttgtcataaaggagctgtatcatgaattttgagggaatgtcactgaagaaaatattctggaggtttgtatggccctccgtggcggcccagtggatttttgcgctgtataccatggtggacgggatgtttgtggccaggggggtatcggaggcagctctgtccgcggtggtggccattttcctgaggcagggcaggcggcgggaggccaatcaggccaacacccagagcacggcggagtatgtgaagcattatattttgtcacttctgcctgtttgcagctgtggctgtggctctctttatttccgaaaagctggaaggactcaggctttactcggcgtctgtattcaggatattcagcctgtcattcctggcgctgggatttaacattgtggggtcaggatattttacggccatagaacggccaaaggagtcactggttatctccatgggcagaggcatgattattatggcggccgcattagcgggctgtattgcggtaatgggaggcgggggaatctggtgggcgcctgctgtatcagagctgtcgtgcggttatcagcgaacgtcagtcaaccttaaatgagaatatgccgttaagggatgccatttattatggaaggacaatggagaaactggttgagtccagagcgctgtaccgcaccggccggattcagattccaacgcctgagttttttgttttctataatggtgacaaacgtttcccgaaaagagagaattctgaaactttcggatgcataccttgaaaagacccaatatcctatgctagaattaagtgtaaaggtaattaatatcaatctgccgtcaaaccacccgattctaaaaaaatgggggccgctgtatgggtattcctggtttatccagcagataaagaattatctgatacagggaaagagccgcgatgaggcaattatcagcgccatgtccgactgtgagcagaagggttttttggcggagtttctgagagaacatggaacggaggcggtgaatatgctgtttacggagttcaatatggaggacgccctggaagggcgttatgaagagggaagaaacgagggaatcagggcttttatcctggattatttggaggatggaaagacggaggaacagactcttgcgcggctgaaacaaaggttttccctgaatcaggaggaggcacagaagtattttggcctttataataccaggaaaaaccaccacagtaattagtgcagtcccggattagcccaggacaaaaacataaagaaatatatgaagggatactgagagataggggaatacatatccccagggagtgccgcgcaacggcatgaatctgctgcaggcaaagagccgtgacaagacaaaacgtatcaggaacgtgataccgcggggccgtgcgctgtacactcagcggcagggcctttttttgcatacgtcggaggtgaattataatagggtgaatgaaataattgccctttgcctccggatatggtaccatgtcatggtatgagaacagaaagaggaacgaaaaatgggaaaactgtacggaatcggcgtaggaccgggggacccggaactgctgactttaaaagcacaccgcgttctgaatgaggcggatgtgattttttgtcctgaaaaggagactggagcaggaagctttgcctttgatatcataaagggacttttggagaacacagaggcaaaaatcgtaaatctggtatatccaatgcattatcacggcgcccagctgcgtgaaatgtggaagcagaacgcgggatgcatcgcagagcatttaagcggggagcgcaccggcgccttcattacactgggagacccggcggtttacagcacgtttatgtacaccctgccctacatagaggcagcaggcgtggaggtggaggtagtacccggcattacatccttctgcgctgcagcggactccatgaaaatgcctctggtggcctggaatgaggacctggtggtggcgccagtgcgcaaaaacagcagcgaggatttgggaagggtactcagggaacacgacaatgtggttctgatgaagccctccactgacccggaggccctgctgcgggccctggaggagaaccacctggaggacaggtttgtgctgattaccaagacaggcacaggtgaggagcgtctggtgactgactttgaggacctgaaaaagtatgatataccttatctttccacggtcatcatcaagaagcaggggaggcagtaatgattctatgtaaagacctgcataaacagttcggtgatgtggaagcggtgaagggtgtttccatggagattcccgacgggatgtttttgggcctgctgggccccaatggagcgggaaagacaacactgatgcggatgatgaccggacttctgccgcctgatacaggcaccgtggcctttgacggaaagggcatggaccggaatgccgtggctgtaaagcaggccattggcgtaaccagccagcatgtcaacctggacaaggaattgactgtggaagaaaatatggagtttgcgggccgcctttaccggatgggaaaggcggatattgccgcgtccgcggaccgtctcctgtccttccttggactggacagcgtccgaaaaagggtgactcagaacctgtcaggaggaatgaagcgcaagctgatgattgcaaagtccctgattcataatcccagatacttatttctggacgagccaacggtaggcattgaccccaatgcccgccgtgatatatgggatttcctgcgcatgcagcataaggagggaaagaccatacttctgaccacccattatatcgaggaggcccagcatctctgcgattatgtgatgctcattgacggaggaaagatatttaaggaggacacgccaaaaggactgattgatgaaatcggaccatttaaggtggagtacgaagacggagacaggatgaaggccgagttctttcaggacctgcccgcggccaaggccagggccggggggattgacgcgctgtgcagcgtgcttccttccacactggaggacgtatttttccattacaccagcaagggggtgggaggatggaaataaccacgattttgtggcgggaatggctgtttcttaaacggaggttctggagagtcacattttcccagatggtatcgccgcttttgtatttcgtgacctttgggattggactgggcagggtgatggagatggacggaaaaccttatctctactacctgataccgggacttttggccatgaccaccatgcgcaacagctacacttcggtttccacccgcatcagcgtcatgcgcctccacgaaaagagctttgagtgttatctgtattcacccacccggatgcatctgctggctatgggacacatccttgcgggagccctccgcggcatgtattccggcgtattcattgtactgttgggaatcgtgtcaggggtcaggctggccatgaacgggtggctgttgacagccgttatcctgaattcgctgattttttccgccctgggctttctggcggccatgatgatggaaagccactacgacatgaataattttacgaatattgtgataacgcccatgtccttcctgtgcggcaccttcttttccctggacggcataccggaggcccttaagtgggtggtgaatattatgccgctgacccatacgacgcgtcttatacgggaaatttcttttggcggcagcgtcagccggctgtccatggcggcggcggtgttgttcgcggcggcgcttaccggaggctgcgtgtgggcatgttacagagaagcaaaagcataaaaacaggaattgtggaaagaactataatattgaggaaaatagattgaaaacgaaaaagaatgaacatgtgataaaagaggtatatcccggctctattgcggaggagatggaaattgaaccaggggatatactggtttcgattaataatgaagtgattgaggatgtatttgactacaggtatctgattaaggatgagtatattgaggtggtcataagaaaaccggacggggaagagtggctgctggaaatcgacaaggaatatgacgatgacctgggggtggagtttgaaaacggcctgatgagcgattaccgttcctgcagcaacaaatgcatcttctgctttattgaccagatgccgccggggatgcgggagaccttgtattttaaggatgacgattccaggctttctttcctgcagggaaattacattaccctgaccaatatgaaggagagggacatagagagaatcatccgtatgcagctggcccccattaacatatcggtacagactaccaacccgcagctgcggtgtaaaatgcttcacaaccgttttgcgggtgataagcttaagtatctgcaaatgctctatgacggccatgtggaaatgaacggccaggtggtctgctgcaagaatgtaaacgacggggcggagcttaagaggaccattgaagatttatctaaatatctgccgttcttaagaagtgtttccgtggttccggcaggtatcacaaaattcagggatggattgtttcccattgagttatatactaaggaggaagcaggcgctgtcattgatatggtggaaagccgccagcaggagttttatgaccaatacggccttcatttcattcatgccagtgacgagtggtacatcacggcgggcagggattttcctgaggaagagcgttatgacggctatatccagctggagaacggcgtgggcatgatgcgtatgttcatcaatgaattcaatgaagccctggaggatgtggtcagcgcgagagagtatgaagggctggctgagactgtttcaaggacgctgaccattgccacgggaaagctgacgtattccaccatctgcggctttgcggaacagctgatggctgcattcccccgtctaacggttcatgtgtactttataagaaatgatttctttggggagaccattacggtatccggcctcataacaggacaggacctgataagacagttaaaggaacggcaggatgcgggtgaggatttgggagaggtactgcagattccttccaatatgctgcgcgtgggtgaacaggtatttttagatgatctgacggtccaggatgtggagcgggagctggggatgaaggtggtggcagtggaatcaggaggcagggagttcattgacgccattttggatccggaatacagaatggaacgaaagaatgataattttgtgtatatccgggcctatgacaggaataaggaaacacagtgacagagaatggcccgatatagtttaaaactatagttgcccataaaatttacaaattatcccttctttttgttttgtgctatgattactgcaatcaggaatcatgacaaatcataaatgatgaccaagacttatttcaaagaagggaaccaacagatatgaagacatcatccttgttcaaccataaaaccgtactgtccctggaggtatttcctcccaagaggacagcgcccgttgacacgatttacaatacgctggatgagcttaagggaatcacgcctgatttcatcagcgtcacatatggggcgggaggcagcgagaacagtcagacaacgcttaagattgcgtctgctattaagcataaatacggcatagagagcgtggcccatatcccgtgcctgaacctgacaagggaggatgtcctgttgattctggaacagctgaaggaacagaaaatagagaatatactggcccttcggggggaccgcgttccggacagggagccggcaggggatttccggtatgcgtcggatttggtggagtttataaagctccatggggattttaacatcataggcgcctgctacccggaaggccatcaggaatcaggcggcctggtaagggatatgaaacacctgaaggacaaggtggacgccggcgtcagccagctcatcacccagcttttctttgacaacgagtatttttaccgcttcagggaacggatggatctggtgggaatccatgttccggtggaggccggaatcatgccggtggtcaacaaaaagcagatcgagcgcatggtatccctgtgcggtgtcaagctgccgaaaaaattcatctccgtgatggagcgttacggggataacccgattgccatgcgggacgcgggcattgcctatgcggtggaccagattgtggacctggcggcaggcggcgtggacggcatccacctgtacaccatgaacaatccttatattgctaaccggatatacgaatccgtattccggctgatggcgtcttagcgcgtggtttgctctaaggctgtctgccaatcagccggtttaattcctccagatatttcctggcaaactggctgagatggatcctggggtccgcaatccatccgatgagcatgttatcctctgtttccagaggaaccgccatgatggagtcgccgttcaggttgcggtttaaaatgccgctgcatatggtatatccgtttaatccgatgagaagattgaacagggtggccctgtcgctgacataaattactttttttctgggtatggtgctgagtatttcctctgagaagtaaaaggagtttttttcgccctgctcaaaagccaggaaggggtaatcctccaaatcattaatggtaacgcgtttcctggctgacaggggatgggatacgctgatgaatacatgggggctggcccggaacaggggatggaatacaagaccgctttccttaaacagcttttccagcaccttccggttaaaatcgttgatataaaggatgcccagctcactcctgtaattcttcacatcgtcgataatctcataggtgcgggtctctctcagggtgaattcatattcgtccgtgctctgccgggataccaggttggcgaacgcattgacggcaaaggcatagtgctgggtggatatggagcagatacgcttcaccggttttttgtttgtgtaatgctgttccagcagctcggcctgctccagcacctgcctggcataggacaggaattccattccctgggaggacagggcaatacccttggagctccggttgaagatggatatgcccatttccttttccagctccttgaccgcgttggaaaggctgggctgggttatgaaaagctgcttggccgcctcggaaatagagccgcagtttacgatggttacaatatagcgcagttgctgtagggtcatgacaaatacctccattgcatttgatgcatggaggtattttagcacgaaatgatatagtttgaaactatgtcattccatattttgatggtttttgcggtatcatcccgatttccgccggcctgtatgtccgcggatttcggaacagatgccgcgaaaggttatgacggtaaggcgtccggcctgggaccggaccctcccatggggagattttatgggagaggcggagtatttccgggagacggcaaagtttgacacatgcctgggcagtggcctgccggatgttttccatggtggctggtacggattgcggggtcatggaagcagctgcatcggagaacagcactagtacagcattgcttaaatatcagtgattaaattactaatggtatcccggcttatgtccacttaaatgggtgtgctgtaagattgtattgttcaataaagcgcaggatgcttgcttccagttcttctattgataggtagcttttccgcttcagcagcttccggttaatgatgccaaaccatatctcaatctggttcatccaggaactgtgtttcggagtatagacaaagcggatccggtgggaagggtcatgcaggaaatccgctcggctttccatacttttaaggatccctgttttcccttttttgcccagttccacgccaagggcacaggcttctgccacaaagcggacaagggcttccgatttatgggtgtttaggccatcgcatataaatgtccatggggcttgcgggtctgtccctaccaatgctttcacggcttccacaaaatcctcttctgtgcgtgtggagtttaaatacggcatttccatacggcccgttgcaacatcaaagaacccgatgaggctggtcgtgccatggcggatatactcaaactccattttggcgcactggccgggtaatgggagcttgtcaggatatttatgttccagcgcttgtaccccggtcatttcatccgtggaaacaatgtgtgcaccttcccggctttgttcctgggcactctggtacaggccgcagatttcgtttactttccgcgcaaaagattccggggcttccgtcttttccgaagaatgaagccagtaacggattttgtggggatgtaaatctacctcatttttaaaaaacggctgacagatttctcagaaatctgttcagcgatcccctgctttttaatttctgccactaacagcgggagactccactggcttacttcgtacccaaaatcatttgggttgctgcaggcaaggtcgatgatccgcatgatctggtccggcgtaaaaacagacggggcaccggggcgttttttatcggacaggactgcccgtatctcatcttcaagctttttcgggtcgtccatttcaatcctccgcaaggctgggagcgccgcgaggaaccgactgcgccaggtggcaacattattataatgaagcccgacctgtggtgcaatattctggttgagttccccctgtgacgcaagcaggacaatgctggctcttttgaccagtcctgacggaagggagcggctttttgaaaaagcagataatatgtttttcatggcatcagataaaaccgggatagtatcaattgttttccttcgcataataacacatccattctttagtgatagaattattatgcaccgactacaataaaaaagcaacgtctattcattattattttggcaatgctgtactaggttaagccggtccgaatccctgagattccccaccaggctccgtatcagctcctttgccgtatcaagcggatacccgaacatggaacccgacacatccgggacaaatatgtattcccggggaggtatcgcctccgctctgacgcgctccggcggctgcaccatcagcataaagaaattttccttttccccggtgcgcagcatgaggccgcagtttatctcctgtccggtgagcctgtaatccaggataaagtcgcggttccctgcaaaatcaccggaatcagagagggtcacacgggcctcggaggcgctttttccctcgcttgcggcctcctcaaattcagctttggcatcttccttttctttgatttttgccgtgattacttcgtcgccgattttcacgctccagtctgactagaaccgcttatcaagctgatgacttctgcattatgtgttgacgcagaaattatcggcttttttgtgctctgttaggaggaaaagaatatgctgattagtattgcttttatgctgatgctgggaatgtttttgggatgggtatgcaggaagctgcgtctgcccggccttatggggatgatttttacggggattcttctgggaccctatgccctgaatctgattgatgtgaccatactgaatatatcatcggagctgaggcggattgcccttatcattatattgatgagggcagggatttccctggacttaaatgacttgaagaaggtgggacggccggccgtgctcatgtgctttcttccggcttgctttgagatattggggatggtcctcaggggagaatattggaaaggagctggggataagatagagtcaggcaatgtggggctgaacgaggacgccttcttcctgaaggaattggcggaggaggcagcccttatcgtcaaaccggatatggacagcagagtgggatgcttcgggtttgtggcggaggacggcggaatcggcatggcgccggaatttctggaaaaactgttcatgctctttgaacgggcctgtccgggaccattcggaataaaagtgcggattaaaagtttgttaaagtatgggtcacccccttgtgtaattcaggcttatccaatataataggccgtaaacagagttacatgaggagaagacggattccatggacggcgaattcggcggcactgccccgaagcatagacattcgatacaatataccacataagtgggatgaggcatggcttgcgcacaattgggtgcaggccgtgtctttttgttttttaccggcataccaataaaagggtgcgccggccatggatgttatacctgtccggacagaaaggaagaaaaaatgaagaccgaagcgagaagaatatttatcattaactgtatgtattttacaatcctgctgctggcagcctttgtcctgctgaaatacgggctgcccatggtggctccctttgtcaccgcgttcgtgattgcgtatctgttaaggaggccaatctgttttgcgtcaggccgtctgcacataaacaggagggttatggctatacttatggtgcttctgttctacagtgtggcggggctgctgtttaccctcctctgcgtcaagatattttctaacgggaaattgctggtggcgagcctgccctcggtttacgccaattacgtggagccggtatttaccggaattttcagcggcatagaacagtcccttctgcgcatggatccgtctctccttggaaccttagaggagctggaagggcattttgtccagtccgcgggacagatggtatcaggaatctccatggaagtcatgggcgggctttccggcttcgcctcatctcttcccggtatgtttatcaatctgctgctcatggtcattaccacctttttcattgcggctgattatgaactgctgaccggattctgcctgcgccagctgggggaacggccaaaggaggttaggttgaaagaaaaaatcaaaaaaaatcgtaacttaacaagagcaccagtaaactgccgccccaaaggatcctatggaataaagggtatcaggccatagcaggaggagtaatcatatagcctcgtttctctaaacgtttgatggcatttctgtcatactgttcctgaaatttccggtacatttcttcaggaatagcggaataatccgtatcggcaggattaaatacctcctgcttttggaacatgtggtaaatgcaagtcaacaccatgcgtgcaatggcaatgattgcccgtttatgaccacgacgtttttttatacggtcatatttgtatctgaagtaagggtttttactcttgatggcagcatttgcacactgaaccagcagaggctttaagtacaccccggctcttgaaacatggacgctcttctttttaccggcactttcgttattttcaggagccagcccagcccaggagcacaaacgttttgaggatttgaataccgccatatccaccccgatttcagcaatgataaaggtggcagactgctctgtaattccaggaattgtagtagccaattcgataaatttatggtaaggtttagccaggtcggaaatcgtttcttcgagagtggagacgcactcattgatttcatcgaaatgctttctgcagaccttaatcttaacggattggtcacggcgcagttcataaccgattatggaggttacaacatcatctgccttgtcctttgcttttttaagaagcagggatttacagtattcggggtcaaatacctcacaggtcaggatatagtcaacgatggcggtcgctgattttccaaaggtatctgagaggacggatgcaagggcaatgttggaaaccgtaagagcattctgtaaccggtttttctcactgctgcggtggccaatcagtttctgccggtatcggaacaattcccgaagcatgcgaatttccttacaggggatataactggaaggaacaatatcaaatttaaacagatccgcaatccaggcggagtctttgtcatcggttttctgtcctttgatagccctgacatacttggggttagcaacgacaacgtgacaggaatcctccaggatattaaaaattggaatccagtatttaccagtggattcgaggcagatctcagtgcaattgaaagaaagaagccattttttcaaagaattaagatcggaattgaaggtggcgaaccgctttttaacataagaagtaacgcccctgtagtctgtcagagcaatggtagcgacaacaaatttcttgtgaacgtccatgccacagcagacaaagtgtttgatagataacataaaacagccctcctaagtaaaatagacagacattgactggctgtccagcaaagaaagacctaaggaattgctttgacaatgattaggttacgagctcaaggcgtcactggtttgtgcttgagaagacagccgacacatgtttttatgcggacttgatcccaaatggaggaaccgattctacttcctcctccgtgctctgtagtgtatctgtctgaggagagtttaacatcaaaaataaaatagcggaagcacaaacttgctatttcataactgttttgtgccaaagcgaagcgaaaggaatgagagtttttatggagatacagtcctatgtggcgggcaccctttttgtgtgcatacgctcctatgccctgatcatgaccattacctttgtggaactgtccatcggcctgaccctgattggggttaaaatcgtgggcagccagattggccttcacccggtagtgacgctggtgagcatgtttgtgggagcacagcttctgggtgtactgggattgtttggattccccattggcctgtccctgctgcgctacctgaacgagacaggggccatccggctgtttaagaccgcgtgaggagaatcgtagcagatattccatgaggaaacagatttccttccatcacatattgcatccctgcccttatgcttggtataatggtaaagataagcgggggaggaaggaaagaatcggttatgactgagaaagaacggatgttgtcagagaagctttatattccacaggatgaggagcttgcggcggactgcgccagatcccggcggctggttcggctgattaatgggaccacggaagaacaggcggagtacagggtgcagctttttaaggagctgtttgccaggacaggtgaaaatttatgggtggaaccgccctttcgctgtgactacggctgccatatttctgtgggtgaaaatttctacgctaattttgactgcattattttggatgtatgcgatgtgaccatcggggataatgtgtttcttgcccccagggtgtgcatctttaccgcgggccatcccatcgacgccggggtacgccgcaggcagctggaatacggaaagaaggtagtgattgggaatgatgtatgggtgggaggaaatactgtcatcaatcccggagtcaccattggggacaatgtgattattggttcggggtccgtggttacgaaggacattccatccggcgtcattgcggccggtaatccctgccgtgtcctccgtcctgtcacagaggaggataccaggtactgggaggagcttgaaagagaatatcggagaagcagaggagagtaaggcatggaacaggaagaacggaagcaccagcgccgtgtgcggtacaggggaacccatcccaaacgttacgaggaaaaatacaaggagctccagccggaaaagtacccggaaaccgtggcaaaggtcatccagaagggaagtaccccggtgggtatgcatatccctatcatggtaaatgagatactggattttctacagatacagccgggtcagaccggcctggacgccactctgggatacgggggccataccggcaggatgctggagcgcctggagtcaaaggggcatatctacgctctggatgtggattccattgagatggaaaagaccaggaagcggcttgaaaataagggctatgggccggagatacttaccatccggaagctgaactttgccaatatagaccagatagtccgggaatcggggcccctggattttgtgctggcggatttgggcgtgtcatccatgcagattgataatccgtccagaggtttttcgtttaagaaagaagggcccctggatctgcgtctggacccgcttaaaggggagcctgcatctgagcggcttaaaggtctgacccgggaggaattaacaggcatgctcatagagaattccgacgaaccctatgcggaggagattgcccgcgcggttatgggtgaaatcaagcggggaagggaggttgccacaaccaccaggctatatgagatgatagacagggcactggcgtttattccggaggaagaacggaaggaggcagtgaagaagtcctgccagagaacattccaggctctgcgcattgatgtgaacagcgagtttgaggtgttgtatgaattcctggacaagcttccgggcgtattaaagccgggaggacgggcagctatcctgaccttccattccggagaggacaggatcgtgaagaaatcatttaaggaaatgtacagggcggggctttacagccaggttgccacggatgtgatccgccctacggcagaggagcgcaggatgaacagccgcgctcattccacgaaaatgcggtgggccgttaaggcgtgacatagcacgaatgcagggaggtatcataatgaaagcattatttatagggggaacaggaaccatcagcacggccgtgacagagctggccagggagagaggctgggaggttgcccttctcaaccggggctccaaaccggtgccggagggaatggaatccattgttgcggacattcacgacgaggaagcggtggcccgcatagtggagggcaggacatatgacgtggtggcccagttcattgcgtatggggcggaggatgtggaacgtgacatacggctctttcagggaaggacgaggcaatatattttcatcagcagcgcgtccgcgtaccagaaacccatggcaggctgtcccataacggagagcacgcctttaatcaatccctattgggaatattcccgcaaaaagattgacgcggaggaggtgctgacggcagcgtaccgcaggaacggattccctgtcacgattgtgcgccccagccatacatatgatggcaaaaagccgccggtggccatccatggtgataagggaaactggcagatattaaagcggatactggagggaaagccaatcatcataccaggggacggcacctccttgtggaccctgacccattccactgattttgccagggggtatgtgggccttatgggcaatccccatgccataggcaatgcctaccatattaccagcgatgagtccatgacatggaaccagatttatgaaacgctggcagaggcattggacaggcctcttaacgcccttcatgtggcgtctgattttctggcagagcatggaaaggaatacgattttgaaggccagcttctgggggataaggcgtgtacggtcctgtttgacaatacgaaaatcaagagggcggtgcctgattttgtatgcagggtatccatggcagaggggattagaagctcggtccgctatatgatggaccatccggagagtcagaccccggaccctcagtttgatgcgtggtgtgaccggatagcaggggcatggaaggctgcggacgaggcatttggaaaatagggattgattgggaaacagtcggatgtatcggcaggaaaagcggataaacggcaggaggtccgggataaatggacgggtgtacatggtgtctgtgcaatgaaaaaatgaagaaataccacgatgaagaatggggtgtccctctgcatgatgaccacaggcagtttgagtttcttatgatggaagtcatgcagtgcgggctgaaccaatgtcatttagttaactttttgtaaaagaaagaatgtttttttaaaatagagatctgacgttccaaacggatagattgaagagaaggatatagggattatttatcagaagtagttttgtaaatattttaccgcaaggcaaacaagcagatttacatctgcttcaaaaaagggtattatagatattgatgaaactgttacttatgctgctcgatatataaaatatcgaggttttcggaagtgtgccgtttggagtcgtggatactgtcgatcattccgtatcggaatcagctcttttgtcagcagggacatcacatctatggagtctttctctgtgttcggacggagaaagactctacaaatatgagcagccatactgaaatttactttgtattcatatttcgtgtttcccttttctataattgcatgattgattagtgtttctgttatgttgtaagcgattaactttgcccaaatttcctgtttgatatattctggtttgtaggcatggaagttactcaatccgaccgtatatttcagcttacggaaagacccctcaatggcccatctggcatagtatagaagttttatttgttccgacgggaattcatctgaaggcagattagtgacgatgcattcataagaatcatccgatatcggaaaccgtacgattctaaaagataaatcgtaggtatccaaggaaccatatgcaacgtaatcaaacgatgcagccgcatccacaaagcgtttgtaataaccttctttaatcgatatcttctttttatgactgcgaaccagagttacatttacctgaatatcaaaggagtctgcatctggaaactcaaaatttccaacaagtcctttggaatggatatctttggtgcgaaataaaaaatactggcctttttccttcacatgtgccatgttgttgtaagaacaatagcccctgtcaccgataaaaacatcttttgtaccagtcagtaaatcgtggcggtcgaccatttcacagaaagcactaaattcatctttctgatggatcggctggatcagcgcatcggaataagtgtgcttctgtaagtcgtaaaaagcattcagatgcatactgtaaaagccctttattgaatgtccttcagagacatgatactcttctggggcgaaagcaggtttactgaaaaaggtaaaggtggagccatctgcagcaagaaagcggtagcgtagctttttttggtcataaaaagaagcaaaatggttaaaatgccgaaatacagcttccagggcatccgggctaagctttgcgcgttgctggttgagtgccgaagcagttggcgactgtggatccatgtcgaagaagtccagcaattcattttttgtgctggaggagccttgggaaacaaggaaagtgataagcttatcggcggggaacttcctgttccttgtcagatcggtgtccgaataggtaaattcggagattacggatgaaacaagatggacggaatgggaaaagcattgtttaattttttgatggaacattgtgtgtacctccttgaattagaatgaatttatgattctaatccaagggccgctctcgctacctattaaagtcaatcagtagcgagagcggccgcacattttgtggtgtatgtcaactgtttttatgaaaaaagggaaaaatatggttagacacccttcattaagaatctaaccataatattgcaaagcgttaactaaatgacattgcgggctgaactggaacatgatgatacagaagcgggaaatcttccgccagtgttttgacgggtttgattacgaccggattgcggcgtatacagaggcggatattgaacggattctgtcctgtgaaggaatgattaaatcccgcagaaaggtagaggctgtcattcataatgccaggtgttttcagaaggtcagggaggaatacggctcattcagttcgtacatatggagcttttccaggggaaaaaccattctttatgcaggccatcaaaagggaaacattccggcctgtaacgccttgtcccggcaggtcagccaggagttaaggaaacgtggatataagtatctggggccgataacggtttactctcatctccaggcctgcggcgtgattaatgaccatgtggagggatgtttccggtatcgtgacattgtggagcattatcccaccgtgaagaagcgggaaaaggagtaggatgcatatataacagttatctgtaatgtggcgataaaagggattccgggctctggggccgggaatcctttttgcttgtccgcgttggcttttgcggtctccggccggaagtattcctcttacacatgcgacagaaaagctttaactgaaattaagaaagacgaaaagaacaaagacgaaaagaacaaagacgaaaagaacaaagaccgcatgcgcgctaccatagaattatcagaggtgccagtacacttgatggccagtacgctggcgccgcgtgaagcgagaaggagactattatgaaaatgagatggcgtgtggcggcggacaggcgtacccttatctgttctgggaaggagaggaccgcacagagtaatgaagggcagtccttacaacctgattacattccagaaggaagcctatgaggagacggccagacttcatatttcgccaaaaccggacagcatcctccgggtattcatggtatacacaccgctggctcagcccgtccaggtggaggaatcggagttaaatgtgtttgagaggaagggcttcactgcggtggagcggggaggaaaggagattttggcagaatgatagtaaaacctgttgtcactataagaaaaccggatatcccgccggggctgacatacagtcctgtcctgaactgcttaaaagagtgccggacattgcatatgcggttttggaccgttccggcacccaggcgtgttacagggcatttcaggatatctgaaatgtgcgcatgacagtgtactgtacgcatgacaggccttgcggatcccatgacagccgcagggcagagcagcagtacctattgacttttaaaatgagccgtagtatacttgtcccaacaatgaaaaggggtgctggagtggaatccggctgagatggaatatgttctgaaccctgatacctgatctggataatgccagcgtaggaagcctgcagaagatgtaagtttttgtgagttttatcccgcccgtaatatccggacgggattttttgatccatatgatttgaagagaaaaggagaaacaatatgaacgcaagcgtagcaatccagtcacttccaaaggcagctgatgatgaggaattaatccgtatcgtggaccaggtcattgattacatcaagagcacggggttaaactattatgtaggtccctttgagacaaccattgaaggggattatgaccagctgatggatattgtaaaagagtgccagtatattgcggtcagggcgggcgccccctctgtggccgcatatattaaggtttcttaccaccccgaaggagatgtgcttaccattgaaaagaaagttaccaagcatcaccagtaaactgtggtctgtttccgccatcctgtccattctcatcctgtggcagctttctgtatcctttggactggtggagggcttcatgctgccttccccggttcaggtagccggtgcatttatgaaggaattcccggccctcatggagaatgccaggattacactggccgaggccgggctggggctggctttgggaattgccgcgggctttggggccgcagtgctgatggaccggtttgacaaggcatacaaggctttttatcccatcattgtactgacccagaccgtgccggcggttgccatagcgcctcttttggtgctgtggtttggctatgaaatgactccaaaggtcatactcattgtgattaccacatttttccccatcacggtggggctgctgaccggattcagggctgctgacccggatgcggtgaatctgttaaaggccatgggagcgggccggttccagatattccgctatatcaagctgccgggagccatgggccagtttttttccagtctcaggatatctgcctcttacgcggtggtgggagccgtgatttctgagtggctgggtggttttggaggactgggcgtatacatgacaagggttaagaaggcattttcctttgataagatgttcgcggtcattttcctcatatcggccatcagcttaattctgatgtgggccgtggaactgcttcagaaaaaatgtatgccatgggaaaatagccgaaaacataaatagaacgggaaaactatatccggcgtttataagaggagagattgaaaatgaaacataaatgtgcaagtatgctgctggcctccctttgcatgggagtacttctcaccgggtgcggcaaagccccggattcaggagagaataccgcctctggccaggccgcggaggatacacggaaagagaacgtaaatagggaaagcgcaagccaggaggaagagggggcgaagcaggatgtaagaaagctgacatttgtcctggactggacgcctaacaccaaccacacaggcctctatgttgcccgtgaaaagggatattttaaggatgccggcctggaggtggagattgtgcagccgccggaaaacggggcggaggtactggcagcttccggaaaggctcaatttgcaatgtccttccaggacagcctagcgccggcattttcaggggataatccccttccggtaaccgctgtggcaggtgttatacagcacaatacatcgggcattatttccagaaagggtgagggaatggaccgcccaaggggactggaagggaaaaagtatgccacctgggaccttcctgtggaaaaggcgaccattaaggatgtgatggaagcggacggaggggattttgataaggttgaactgattcccagcacagtgacggacgaggtgacggctctcaggacaaaatctgtggatgccatatggattttctatgcatgggcaggcgtaaagacagagctggaaggtctggagacagattactttgcctttgcggatttggattctgtatttgatttttatacgccggtcatcatagccaacaatacattcctggcggaagagccggagacagccagggcatttctggacgcggtcagcaggggatacgagttcgccatagaacatcctcaggaggcaggggacatcctgtgcaaggccgcgccggagctggacccggaactggtaaaggccagccaggaatacctggcggacaagtatcaggcggatgcgccaaaatggggatacattgaccagaagcgctgggatgtatattacgcatggctgaatgaaaaaggtcttacggagacgcccattgaggcgggaacaggattttccaacgaatacctgccgtaaggccggggacggcagtgccgtgccaggaggagaacatggagcagctaaaggtagagggaatttcaaaatcctttgacggggagcaggtgctggaggatatatccatcaccctgaacaagggggaactggtgtcgctgctgggaatcagcggaggcggcaagaccactctttttaatattatcgctgggctgtcaaggccggatacagggcatgtccttctggacggggaggacgtgaccggttgtccgggacgggtgagctatatgctgcagaaggacctgctcctgccctaccggaccatagaggataatgtggcccttcctctgattgtaaaaggaatgaaaaagcgggaggcacgggagctggcatccccctacttccgtcagttcggcctggagggcactcagaagaaatatccggcccagctctccggcggcatgaggcagagagcggccctgctccgcacgtatctgttttcaggcagcgtggcgctgttggacgaacccttttccgcactggacatgatgaccaaaaaatccgtccatgactggtatctgaaggtgatggatgagatccatctgtccaccctgtttattacccacgacattgacgaggccatattgctgtccgaccggatatacctgctgacaggcaggcccggaaggataacagaggaactcatcatagaggagacaaagcccagggacagggatttcggccttacggcagaatttctggaatataagaggcatatactgaaacatcttgaaaggacagtctggatgaggttgacggggacagggaaagaatattataattaatatattccaatgaaaagccgggtgcggaaaagaggtagccataaaaagcagaaggagacaaccgccatgattctatatttttcaggaacaggaaatagtgaatacatcgcgaaaagaatcggagaagagataaacgacgaaatcatgaatctgggagagaaaatacgcagccgcgacttttccggcatacactcagacaccccgtgggtcgtggccgcccccacctacgcgtggagaatcccccgcatcctgcaggaatggctggaaaaaacagaattaaccggaaacaaaaacatatatttcgtaatgacctgcggcggaaacattggaaacgcgggcagatatctgaaaaagctaaccgacgccaagggcctcagctatcagggctgcgcccagataattatgcccgaaaactacattgcgatgttcaccacccccacccgggaagaagctgccgggataatccgccggtcccaaagcgcaatcgacaaagccgcccggcaaatcaaactcaacaggccgttcccccaggttcccgtaacacgaaaggacaagatcaacagcgggattgtaaacgacattttttacccaatgttcgtccacgccaaaaagttccgggcgaccggcgcctgcatatcctgcggaaaatgcgccaacatctgccccttaaacaatatccgcctgaaaaacggcttccccgtctggggcagaagctgcacccactgcatggcatgcatcaaccgctgtccaagccaggccatcgaatacggaaaacacacccaaaaccttccgcgctacacctgtccagaaagcagaggttaaaccattggtttagcccctgctttgccatttgaatccatggcgcctttttcacggcgtcaatctccggtacgcgttcaccggcaccttacaaatctaatttcaaatccccatccttaatccatcccatcctgcgcagcacctccccaaacacaaaggtcagcacaccgggaagcaggaagcacaccataaggatgcccacccacatccgggttccgccgcccatggccgtatatacgccgatggggcccaccagaccgcaggtgcccatgccggacccggccgggatgttttccaggcggaagaccatggtggcgatggggccggtaatcatggacgccagtgtgggcggtatccagatacggggattcagcacaatgttgcccatctgcagcatgctggtgcccaggccctgggccatcagaccgccgactttattttcgcggtagctcatgacggcaaatccaatcatctgggcgcagcagccggctgtggcggcgcctccggccagtccgtccagggacagggcaatacagatggcagcgctgctgatgggaagggtcagggcaatgccgataaggactgacaccaggattcccatgatgaagggctgcatttccgtggcagtctttaccaggtttccgaaccagttcatgaattgggccacgccgggccccacgaactgggccaccagcacaccggagataatggtgatgccgggcgtcacgatgatgtccagacgtgtttccctggatacaatcttacccaattccgcagccacgatggtggcgaccagggcgcccacaggaccacccagggcattgcccgcgatacctaccgtggcagcggaaaacagcaccagctgaggcgcctttaaggcgtgggcaatggcgatgcccagggccgcgccggtagcgcttttggcgtagtcggcaatgacgttgaaaatttctatctggagctgccggcccagggtaccgaagatggtgccgatgagaagggatgcaaacaggccgaaagccatggcccccagagcgtcaatcagataggtctgcaccgtgatgttaacatttttccgtttcaggaattctttcacacttgattttgccatacttatattctcccttttccgggctgaggggtgtatcggaatttatacgctccggagcctttattttgttagggattttatcacatattcataaaaatgcaaggtttttgactaaaattgcagattcgttaaaatattaacagattgaaaaataatattatgtgggatataatggtatgaacagggaatattaacctggaaatgaggtgaacggtatcgaattccagattttatatacactgcaggaacttcacacgcctttggtagacgggcttatggtgttcataacctctctgggcgaccacggatggttctggctccttatgggtgtcctgcttttttcatttcccaggaccaggcttttaggcggatgtatgctgatatccatagcagccggatttcttttgggcaatgtactgcttaagaatatggcggccaggcagcgcccatgctggctggacccttccgtggagctgctggtccgtgtccccaaggatttctccttcccttcagggcattccctggtgagctttgagggagcggtctgcatcttcctttttaacagaaaatgggggattccggcccttatgctggctgtgctcatcgcgttttcaagactgtatctctttgtacattttcccacggatgtgctggcgggaatcatcatgggaaccgtaattgcgtggttcgtggtgaggacggctaagaggcggacggaaaaaacggaccgggtgccaggggctccgtgatatggcggcaggctgataaataaaaatgaccatagaatgacagaatgaaagacaggtggaagttatgttggaacgcgctccgggaatttttgaagtggagcttcacagcaatcagaaaagcattgatgagattaagatattcctcattccgggaaatgacggggagagaagcctgatggtggatgccggttttcgcagcaggacgtgtctgcacgtcatggaagaggcgctgggaaaactgggaatcacctatgacaggctggatatattccttacccacaagcatcatgaccactgcggcctggccagcgagtatgcggccagaggcgcaaggctgttcatgaatccgcaggaagacaggcactgttacgactgtctgtactataatcacagccatggctcctcggaggaccagccccaggtgctgcagagcgttggggtgacagaggaggggacaccggagatatggaacatgttcatggaagtgaaccagaggattcgggagaacaggggatgggaattcgagattccgggatatccatatacaccggtaaatgagggacagattctgagctatggggattatcacctggagacagtcgggcttaaggggcatacctacgggcagatgggtctgtacgaccggaatcataaggtactcttttgcgcggaccaggtcattgacggcattgtgcccattgtgggtaccacctatccggacgagcacctgcttaaggggtattttgactccctggaaaggctgaagcaccagtacggagactgcctgattcttccggctcacaaggagcccatccgggatgtgaagcgggtggtggaccggattgtctttgcctatctggacaagacggatttaatcaagcatatactggaccacggccatcacaggatgaccaccagggaggtggcatgcctggcctacggtatagaccatgtgcccagggaccagtctgagtttatcaagcttaagatggtcataagcaagaccttttcctgtctggaatatctgtatgatgaggattttgccatccgcactctggagggcgggagctattactgggaagcgccgtaaggaaaataaaaaagtgcttgcatatcttcagatatagtgtatagtagaaggtacaataaaaacagaagcagagtaggtatatgtgcgttaagtgccggctggacagggagttgtcagctggacgaaagaggattcccaaggggaatctgtctgcggtacatataccgcatcccgctgcaacagagatagatggagcggcctgttttatgtgcagccggtttacgccggccaaaagcgtgtatggaaatcaatgatataacacgctctcgcacagggaagtcatgtccgggcatataaacgtgcgtcggataggtttccggggccgttttttgtatgcaaggaagaaaggttcctgcacctgccattgcatatctccgtttgtagtccgtgaaatctgcaaaggaggtaatgaatcatgaagaaattagcagaattgtttggcagttcatcccgggagcttaaaagcgtccggaccatcactgtgtgcgccatgctggcggcagcggcaatcatcctggtgaatttccgcattgagctgactaacacccagagaatcggcttttccggcatacccaaccaattagtggcctatctgttcggacccgctgtcagctgtctgttcgcgggggctctggacattatcaagtatctcataaagccggttggcgccttctttcccggcctgacgctggtaaccatgctggccggactgatttacgggtttttcttttataagaagccgttaaagttcaccagggtgctggcggcccacttcctggtctgcctggtgtgcaacgtgattctcaacaccctgtgtctcagtatcctgtacgggcaggcgttcatgctgcttctgcctccccgtgttatacagaacatagtgaaatggcccattgattccttcatctttttcaatgtggccaagatgctggagatgtccggcgtgttccgggctgtcaggggaagcagggccgccgtgcagcggtagcggcagaaacggattaaaagttatttatttaacgggtgaagcatttaacaagtgcgggaaaggaaagccacagattgccctgtactgtttacagcaaaatgccctcgggattcaggtaagaaacctgccccgggggcattttgctgtgaggggatctgcgcgggccggaaccgcctctgagaattgccggtctgctccgttaattttgcgacgggctgtttcgcaaaaagtacaccggcgctgttgcttcgcccggacggctgtgctatgattggggctgcaaaaagagatgagagcagtttaaaggaggaatcatgccatggcagttcatgtaatcgacgaggccaaccgttgcctgcagtgtaagaaacccatgtgtcagcagggatgcccaatccacacccccatacccacgatgatcaaggccctgaaagaggggggactggaggaggcgggagccatgctgttttccaacaaccccatgtcactggtgtgttccctggtatgcaatcatgagcggcagtgtgagggccactgtgtcctgggaagaaagggacagccggtccatgtgagcagcatagagaattatatatcagacacatgcctggagcgtattgacgtccggtgccagccaaagaacgggaaaaaggtggctgtcatcggagcggggcccgcgggaatcacaattgccattctgctgacacagaaagggtacagtgtgaccatctttgactccagggacaagattggcggcgtattgcagtacggcataccggaattccgtctgccaaaggcaattttggagcgctataagaaaaagcttctgtccatgggaatcaggattcgtcccaataccaccatagggggagccctggaaatcaaggacctgttccgggacggatatgagagcatcttcatcggcaccggtgtatggcgtccaaaaaagctgggaatcaagggagaatccctgggaaatgtgcattttgccattgattacctggccaatccggatgcctacgacctgggagacagggtggctgttatcggagtgggcaattccgctatggacgtggccaggaccgtcatccgaaagggttcccaccatgtgaccctctatgccagagggaaccactcggacgccagccttcacgagacacagtacgccatgctggacggagctaaattcgagtttaacaggaatgttgtggaaatcaatgacaacgggcctgtattccagcagattctgtatgatgaggaaggcaatgcggcaggggtttccgatgaaaaagagcaggtttacgctgattctgttattatctccataagccaggggccaaagagcaagctggtcaataccacagaggggctgaaggccaccagaaacggccttttggagacggacgaacagggggagacaacggtggagggaatctttgcctccggcgatgtggttctgggagccaagacagtggtggaggcagtggcctattccaagacggttgcagatgccatggatgcctatatgaagaaaaaagatatgaaagaaaaaaataaaaaagacgaaaaaaggactggccggccgggaatagccgtggtaaaatagggattgaaaacgtttgcaaaggagaagggtccatgaaactgaatacaggcatgagatgccatgatttatgtccaaagatggaaatggaaaagctgtttgcccaggtgagggaacatgatatccgccagatccagctggcatttggaaagtccatcagcgattacgattttaccacaggccattacagctccggatttgcccggaccattgccagggagctggagaagaaccaaatccatgtggctgtgctgggctgctacattaatcccacaaaccccattgaatccaggcgccaggcagaggtggcgcgtttcatcgaacacatgaaatatgccagaatcataggggctgatatggtgggaacagagaccggacgcctggacccggattttagggtcacagaggaatcctatacggaggacgcttaccggctgcttcttaagagtatgagggagatcgtggctgcggccgagaaactgggcgttatcgtgggggtggagggcgtatttaaccacacgctgtacagccctgccaggatgaagcggtttctggaggacattgattcccccaatgtggaggtgatactggacgccgtgaacctgatccacccctatcaggtggagccggaggcccagaagcaagtcattgacagggcctttgcatattacggcgaccgcataggggcccttcatgtgaaggattttgtctttgacggtcaggaacagatgttccgacatgtgggtgacggtcttttccggtatgaaccccttatgaagcatgttaaggagagaaagccccatattgccatgctgctggagaattccggcagggagcgttatcatgaggatgtgaagttccttcagcagatttacgaccgggtgtagagggcggtatgcgggcagtctgtccggaacaataggccgtgaaaccggctaaaagagctgacaagccggttaaaagagaagtgaggtcagtggaaatccaatacatagaacaccccaaagctgataagaaaggctttggggtgttctatgtttgggatattgctttccgatcatcgggctcggatagagtcaggcatgagctcccaacttccgcttcattttccggaaggtaagaatgaacagtgttaccgtggtgcacactgctatggtatcggcaatgggttctgccacgaacacggcaaacaccttgttttcaaagatgttaggcagaatgtaaatcaacggtatcagcaggatgaccttgcgcagcagggccagaaacagggaggtcttgctgtcgccgatagcgataaaggtctgctggcatgccagctgggctccgaagagcagggacgcggccatatagatgcggatagaccactcgctgaagtctgtcagggcggcgtcgtgggtaaagatgcggatatataccatgggcgcgaacatggccacggcccagagggcggtggagtaggtcaaacatgaggtcagaagcagccggaaggtcctgcttacgcggtccagctttttggcgccgtagttaaagctgataataggttgtgcgccttgggtcagtccctgaaggggcaggagggagaactgcatcacgcttcccatgatggtcatggcccccactgccacatcgcctccgtactttaggagggaggtgttaaaacagatgttcaggatgctttccgtgaactgcatgacaaagggggcagcgcccagcgcaatggccggcatgaggatttcccttttaggccgcatgtaacaggcgcgtattttcaggtaactcttatttgatatgaggaacaggacaacccagacagcggaaattccctgggagatgatggttgccagggcagcgccccgcacgcccatatggaacacaaacatgagaatagggtccaggatgatgttgcatatggctccgatgagcacggtgtacatgcctgtcttggcatatccctgggcattgatgaaggcgttgagtcccagagccagctgtacgaaaatggttcccagggaataaatctgcatgtaagcccacccatactctatggtattgccgctggctccgaacatcagcaggatgctgcggccgaagatgaggaagaaagcagtcaggacaacggccacggttataagagcagtggtacagttgcccaggatgttttctgcttcttcctttctgcccttgcccagcataatggatgccctgggagcgccgcccatgcttaccagggcagcaaaggcggaaatcgccatgataaccgggaaggtgacgcccacgcctgtaagcgcatgggcgccttcgccgggcagatggccgatatacatacggtccaccatgttatacagcacgttgatgatttgggctgtaatggccggcagagccaactgaaaaagaagttttcccacgcttcccgtgcccaggtccacctcttttgcttctttgttcttctccatataattcacaatcctttcgtatttcaaaaatagccatttaaatactatatctcgaaacattgggaaagtcaaccagatggacggatggcaaaaagccgaaaaatgaatcctgccggagagacaggaacggaacctgtcgtgattatacaaaatacataaaaacaagtgcgataaagtggtggaatattgggattttgtgaccatgtgcataaatatgtatttttatattgacaggaatgtcagatgatactataatgcagataataatacaagctgtaatgataatatgtaataatatgtaataataatcttgccaggaggtaacagtatgagagacaaaattgccggagcccttttcgggatggctctgggcgacgccatgggcatgcctgcggagttgtgggggagaaagagagtgaaagcttttttcggacggattgagggatttttagacggaccggctgagaatgatgtggcttttaattataagaagggacagttcaccgatgatacgggccaggctctggttctgctggactccattgcgtccactgactatgaaccggacacaagggacattgcccttaggatgttagcctgggctgaaaaggagaatgcctttgagaacaatatcctgggccccacctccaaggtggctctggcgaatttcagggacaacatccaggattccaggattacggacaaggcactgtccaacggaagcgccatgaggattgcccccatcggctgcctgttcaggccggaacagaaggaggacattgctaggtatgtgtaccaggtatcaagagccacgcataccagcgatgtgaccatagccggtgcggccatgattgcggaggcagtgagctcggccatggtgaaggatggctttgatgaggtcatggaggatgtgtttgggattgaggagattggttacggcatgggctgcgagaccttcagtccaaagctgggagagcgcttgaagatcggcctggacattgccaaagcccacaggggggatgatgaggggttcatccgcaggctctacgatgtggtaggcgccggggtggggattattgagtccgtgccggcagccctgtccgtggcatactttgcccaggaccccaaccggtcctgcctgctctgcgccaacatggcaggcgacacagacaccattggagccatggcaactgctgtctgcggggcatttacagggcttggacagataaaacaggaatacattgaaaccctgaggcagcagaatgacgctgactttgaccattacatacagatactggaaaaaggaagggagagacttgcatgaaaacccttgtgataggtgcagccatcattgatattatcatgaagataaagcgcctgcctaaaagcggggaggacattctgtgcagtgaaaccgtgtcagctgtggggggatgtgcctacaacgtggccggtacgctgcggggctttgacgcggaccacgaccttttcgtgcctgtgggaaggggcatgtacgggaatatgattgcaggcgatctggaaaaactgggataccccatccttatcagggaagaagagtcggacaatggttactgcctgtgtctggtggaggaggatggggagcgcacattcatcacggtcaagggcgcggaagggtgctttaggccctcctggtttgaacagctgtcccaggatgtctatgacagcatctatgtggccggataccaggtgtgcggtaacagcggcagggtcatatccggctggatggagggcgcgaaggacaggatgaaggaaaaacgcgttttctttgctccggggcctgtcataaccgacattgacggggatgtgatggagcgcatcctttcagtggagcccattctccatctcaatgagaaggaagcctttgattacacgaagcagccgtctgtggagggctgcctgaggtatctgcacggcctgaaccataaccttgtggtggtcaccatgggggcttccggcaccatgtattatgacggcagcaggataaagacggttcctgcctgtaagacccgggtaaaggataccataggggcgggagacagccacgtggcagccatgattgcggggtattccaaggggctggatacggagcaatgtgtgagactggctaaccgggtggcatcggaaatcgtaagcatccaggggccggtgatgaccagggaaatgtttgaacagcaggattttgcgtcctatatcctgaatggctgcatataacatacgaatgtggaggggaagtttatatgaataagataaaagagttctttcgtgattggagtatatttgaaaaagtctggctggtttttgtgtgctcgcttatgaccgttatatggtttatcaacggggatacgccgttcatgctggtcttaagccttacaggcagcctgaacctggttctgggagccaagggcaaggtggcagggctttactttgccatcatcaacagcgccctgtacgcgtaccagtgcctgggaatcccgctgtacggcgaggtaatgtacaatgttctctacagcattccggtcagcgccactgccatctatctgtggaataggaacgcaaccagcgacggcgaggtccggttccgcaccatgacgcctaagcttatggcaggggtggcggcggccacggccgcgggagtatggggatattcagaactgttaaaatacatgggcggttcctttgtatttatggattcactgaccacagtggtttccgtcatagccagtatgctctatttgctccgttattccgagcagtggcttatgtgggtcattgtcaacgcgctgtccatcatcatgtggattatggtgtttgtatcaggggataccacggccctgctcatcattgtgatgaagacagtgaatctgctgaattccctctatgggtatatgaactggaggaaaatatcgcagaaaacagcgaagtaaccccttttctctcttcaataagttgaaagaatgtctctctcagtatataatgataaaaacagaaaaagtgcggattgaggttattatgagagagaaattagccaaatatgagcagatcaggcaggatatcatacataaaatcgagagcatggaatacaggcccaaccaggtcattccatcggaaaatgagctgtgcgcatcctatggggtgagcaggattacagtcagaaaggccatagacgagctggttcatgagggactgctctaccgaatcaggggaaaaggaagctttgtcagggaccatgcgtcggagggactgtcacgcatctacagctttaccgaagccatcctccaccagggaaagacgccgtccaaaaggctgctgtccctgaaggcggaggaagccgacgcggacataaggcgcaggatgggcttaaaggagagggaggaggtctacgtcatcaagagcatttattatgcggacggcaggccctattgtatcaatacctccattcttccaaagaagctgtttcccaagctggagttatttgacttcaaccgcaactccctgtatgaggtgctgaaatccttttaccagctctccttcacaaaggcgcggcaaattttaaacgccacggtggggagcagcgaaatctacggatatctggagacggaggaaaatcagcctttgctcagaatcaacgccacctccttctgtctgtatcatgataatgagacggtattcgagatatatgagtcttatatattgacagacatcctcagctattatgtggaaaaatataacacgtgagaagaacgttgaaaaagatactgcttgcgatggaaaaagcggtccctggctctaaggcaggggccgctttttgtggaacaggagcagaagtcccatgtagctgaagctcaggaacagaatctgcaccgttgtcatgataaagaggggaagctctttaagccagacgcaggcctgtgaaaatgccaggtacatgccgatggagaccagcagaaggagtacaggcttaactatcatgttgatggtatcccagcaaaagggtaccagacgcttcaccgcaaggaagctcatgagggccagagccagttcactgaccagcatgccccacaggtatcccagaattccgtatctgggaatggcaaagagcacaaacgccagccgtatgaccatggcagacacattctggaaaaaggtggatgaagtcctgccgaggccgtttaagatgctgcccatagtagtggccaggtacatgaagggacacagccatgacaggatggtgatatatgtacccgcgttttggtcgtggaatacgctgacgcccagctggttcccaaaaatggtgaatatgccgatgcacagcacgcccatatagcagctgtatcgcagggacatggatatcatggaggaaatacgggcctcgttgccgtcggcctgggcttcggccaccgtgggcagcaggagcacggccatggagttggtgatggcggagggaaacagaatgaacggcaaggccatgctggtcaggacgccgtatacggacagggcctcggagttggtaaggccggagctcatcagcttgttgggaatccatatggcttccgcacttcccagtacatttaaaatcagccggtttcccataaggggaagggccagggccataaggggagccgcggtggcgccaaaggaaagggggatggcaggagcgcggcgggagtctccgtctttgcagggcggaaagaatccgagacagaacacggtgaacatggcagatgccatctcgccaatcaggtgcccgtatacagccaggcttacggtgatctggcggcctgattccagccagatgctggcaatgaggaacacggcacccatgcgtatgacctgctccgccacctgggaaaaggccgggacacgggctttctgcatgccgtagtagtaaccgttgatacaggcgtggagggccgcgaagggaacggacacagccatcaccggcagatagggagcgcatctgggctccagcagaagcttttctgcaaggaaaccggcatttccatagatgccccaggccaggaggaaggacatgcccatggcaataaccagacccgtcctgaatacggctttgcccctggtctggttggcagccacgtactgcgacagggcggtctggatggagcctgcgcagacagcgaaacagatgctgaatatggggtgcaccatattgtaaatacccagtccctcggcaccgatggtcctggacatgaagattctatagaagaatcccagtatcctgcatatgaacccggtggaggtcaggagtaaggtcccggtgatgaaggccattttcctgggtgacagacgcttggagacaggggaggatgcggtcaatgagtgattcataaacgctcctggagatgggaattattaaaaatatatgatgaattccaggatgtagaacccattggacggcgatttggaggcatccccggagcaatttccatacactttctaagcagttggttttacagtctgcttcatcctgttaaattccctgaatatgccccggattatgactagcgtgagaaccagggtgccgatgtctgcaatgggctgggccagctggatgccgaaaaggcccaggtgatgtgtggcgatgagcagcaccggaagagttgacgaagtagatcaggcggtttacgatggccatggccgcgatggcagcgtcgccaaaggggtgggccgtggtatttaaaacaatggtcgcaatactggccataccctgacgggtcagggagggcaggccgccgcttaagattttgccgaaaaaggaaaagggatggacggaaattgccgatgcggatatggatacactccctgcgcaggttgcactgggcgagaagaatgcagaaactgataaactgggacaggccggtggcaatggcggccccggaggtacccagacccaggccgaagataaagatggggtccagggcaatgttaaggatgccgcctgtggtgattcccaccatggcaaaggcggccaggccctggagccgcagcaggttattcatgataaaggaacacatcatgaaaggcgtggccaggaaaatgtagcgggcatattccactgcaaagggcttgatggtttccgtggctcccaaaagcatgacaacctggtcaatgtggaacaggcagaaaacgcccaggcaggtacccaggataaagccggtgaagaatgcaacggagacagccccttccccgtcctcgtggcgtccggcacccagacaccgggcttccccaggagtcaaacggccttcttttccacggcacctatgccagggccagcgcgggcaatccctgcgccaaccggggtggggatgagtgcaatacctggggggattatttttatatggaggcgcttaccaggcttgtgggggaatgggagccgtattggtattaaggaacggaatcattattataattaggagtgagaggcagactgcgatttcattacagtgtacttcgagctcctgattttgtatatgaagatattagaataattatggtattttaagttttggcatggagaataaagtggtttagtcaagattaaagaagaatgacatattaaataagtcaaaaataaattgacataccaagtcaaatcaactatactattaaatatagtaaggaggtgggtattttgctgggactggagtatgtatgtaaattgtatgatatttcttatttgaatttagctaacaaactagaggttacatctcagcagataaatgactggataaaactcagaaggaggataccgcagcaccatttggaaaatgcaagcaaaatattaggtataccatcagcataccttgaaaaggaattagacgatatagataggatacgaatacaggagattaaaatcaagagagagaaggagcggtatttttcaatgacaaaaggacagaagagagtatgtataattaactataagggcggggtgggaaaaacaacattagcattaaatttagccgcagggttatcaacgaaaggaaaagtactgcttatagatgtggaccatcaagcaaatctgagccgtgcgtgtttaaaatccaaggaatttacagaagataacagtgttgcagcaatatttaagtcgtatataaacagaacccagatgccagatacccagataattgaaaaggctccgctgaaacggtttaaaaatttagatatcctcccatcaatagaggaattagatgaatttgagtttgatttagcaagtacagctcatgcggatgatttccatgattgggataagaaaaccttgatttgtaaatggatagatgataataaccttgaaagtgagtatgattatattgtttttgattgtcctccggcaacgatgaatataacacagaatgctttggcggcttcgcatttttatattgtgcctctgatacccagcgaactgtccttacgtggtttgaatcatttaatacatatgatagataataaaatatatagtaagctattggcatataagcagatgttggagataggaatccaaaacggattatacaaaaactgtatatataagtcatttgttggtcatatagaactcaaagcagctgtgttgagcatggttcaggtggcgcctaatacatataatagatatgggtgtacggatgtacaccaaagaggtatagatcagctaaaacagtgggagaagtcgatggatggtttaaaaggaaaggttttgtatgaccacattgtttacaagagaactgatatagaaaatgccatgggtctgggtatgccggcctataatacagaatatgataatcagggtgagataacagaactagtagattatatagcgaaaatattatgattcaggagaagaaatatgattaaaaatataaggatagagttgatgcggttattctataatgactgtaatttaagtcatgatataaaagcgtgtgatgagatggaagccttttttgatgctttaaagatgttggatacatttacggttgaccagactaaaaattattttgataagattagggaatctgtttccaatgtagaggcactagctcctgttaaaaggtcccgaggtggctgtgatttattaaatatattacaaacaatggggctggagtccttatgctatgagaatattacgattgaagtagtaaaggcattgcaggctaacgacaaaattacgaaagcattggcattacagttagcagaaaaaattggtattacaaaaaaatcatataaaacccgcaaggatattttttatgacatcgttcggatgattaataaccgtgacacaatgaatgcaacaaaaaatgcattgactaatgaaattcctaatattgatgaatagagaagtatggtcataaactattttcgattttggtggaaaagattgtatgatatgaagataggctgtccctgtagtgggatggcctttttgaataaagtgtgtctaaatataggttgactggccgttttcagatagtcatggattgattataaggacacaaatgtagttttacataatctggaaaatggtaatatccttgaatttttcatataataacagtagtgccatataaaacaagtattcctattgaaattgtaggaatactatggtatagtaaaaagcgtagatgaagcttttaactttaggactacagaaaggcggattttgattatgaagcaattgatttatctggataatgcggccaccacaaagaccaggccggaggtggtggagtccatgcttccatactttacggagtattacggcaacccctcctcggtctacgacttctccactgagagtaaaaaggccgtaaaccatgcaagagagaccattgcccggtccctgggtgcaaagaccaatgagatatattttacggccggaggcagcgaggccgataactgggccctggtggccacggcagaggcctatggaaataaagggaaacacatcatcaccaccaagattgagcaccacgccatccttcacacctgccagtacctggagaaaaggggatacgaggtcacatatctggatgtggatgaaaatggagtggtcaagctggatgagcttaagaaggccatccggccggacaccatcctcatatcagtgatgtttgccaataatgagatcggtaccatcgagcccatcaaggagattggggccattgccagggaacacgggattttgttccacaccgatgcggtacaggcatttgcccatgtgcccattgatgtggatgagtacaatattgacatgctcagttccagcggacataagctgaacgggcccaagggaatcggatttctctatatccgcacaggtgttaagattcgttccttcatccacggaggcgcccaggagcgcaagcgccgtgccggaacagagaatgtgcccggcatagtgggatacggcaaggcagtggagctggccatggccaacatggaggaacgggctgccagggaaacgaaactgcgggattatctgatgaagcgggtcatggacgaggtgccctttaccaggattaacggctcacgcaccagccgccttccgggcaatgtgaattttgctttccagtttattgaaggtgaatcccttctcatcaaactggatatggcaggcatctgcggatccagcggttcagcctgcacttcagggtcactggacccatcccatgtgcttttggccatcgggctgcctcatgagattgcccacggctctctccgtcttaccttaagcggggagaacacaaaggaggagatggattacgtgacggagcagattaaggatatcgtgggatacctgcggagcatgtcgcctttgtatgaggattatataaagcacaatggcggtgagaaaaaataatatacagggaagtgcctgtatgaaagataaacttggaacgattcaggaggaatatagatgtacacagaaaaagtaatggaccattttgagcaccccagaaatgtgggtgagatagagaaccccagcggaatggggacagtgggaaatcccaaatgcggcgatatcatgcggatttacctggatattgatgagaaccaggtcatccgggacgtgaagttcaaaacctttggctgcggggctgccgtggcaaccagcagcatggccacggagctggtaaagggaaagacggtccaggaggccatggccgttaccaataaagcagtcatggaagcacttgacggactgcctccggttaaggtacactgttctctgttggcagaggaagcaatccatgcggccctctgggattacgcacagaaaaacggtattaccattgagggcttagaaaagcccaaggataatattgaggaagaggaagaagaggaaaactattgagcaggaaggtagtagtaggcatgtcaggaggagttgactcctccgtggcagcctggctgttaaaggaacagggttacgacgtgattggcgtgaccatgcagatttggcaggacgaggatactgaggtccaggaggcagagggcggttgctgcggtttaagcgcggtggatgacgccagaagggttgccatggacctgggtatcccttattatgtcatgaatttcaaggaagagttccgtaaaaacgtgatggattattttgtaggcgagtacgtggagggaaggacgcccaacccgtgtattgcctgcaaccgccacgtgaagtgggagtcactgctcaggcggagcatggccatcggggcggattacattgccacaggtcattatgcgcagatagacaggctgccgggagggcgttattccctaaagatctcggtgaccgccgcaaaggaccagacatacgctctctacaacctgacccaggaacagctgtcccataccctgatgcctgtgggaagctaccataaggaggagatacgggacatggcagagcgcctgggacttccggtggcacataaaccggacagccaggagatatgctttatcccggaccacgattacgcgtcatttattgaggaatacacgggcagggagctgccgccgggaaacttcgtggacctggacggcaatgtcctgggccgtcataggggcattacccactatacggtgggccagagaaaggggctgaacctttccatgggccgccctgttttcgtggtggaaatacgccctgaaacaaatgaagttgtcatcggtgacaaccaggatgtatttacaaatgtgctacgctgcgataaactgaactggatggcagttgacgggcttcatggaaagtccatggatgtcttggccaaaatcagatacagccacaaaggaagtccctgtaccatccgtgaaatcgggaatgatatggtggaatgccgtttccatgagccggtccgggccgtgactccgggacaggccgtggtattctacgacggggattatgtggcaggcggaggtaccataataagatgaaacggaagataagagaaagcagcgccgcatgtaaaagcagtgcggcgcccacagacagaatggaacgcaacggaatggcacgtaacaaacggcgggtaaatggtctggccgccattgggctggcaggcatcatggccgccggcatgggtctgaccgggtgtggaaactatgtgcccagcagcgagatgaaggccggaatccagtccgaaggcggggaggtgtcctggggccaggagagcccgtcagccggcgagccctcagttgcgcgggaagaaggcagtgcggataaaggcagtaaggccgagaccatcaaactggacacagagcgaaccacggcacccatgcctcagtttgaggatatatcagacactgtctatgtgaaatcatcaaacggcggcagtgtacgcatacgctctgcctgcgatacaggggacgattccaacattctgacatacgccagtcccggaaccggactaaagcgtaccgggaagggggagcagtggaccagaattgattataatggaacgccgggttacatatcatccggatatataaccacccaggttccggagaccacggccgcgccgccccgggcatgtgtggacagcggggagataaccctgaatccttcgtggaaatacgcggagttttccaagatttattcgggtgcggcggcactgtaccgctccgaggcagcaagccccaagggcattacggtctgcgtcaatgcggggcatggaaccaagggcggagcttctgtcaagacgctgtgtcatcccgacggcacacccaaggtaaccgggggcaccaccggcgcaggggccaccttggcggcagccgtgtcaggcggcatgacctttgccgacggaaccgccgagagcaaggtgacgctgtccatggcaaagatactgaaggataagctgctggcagcaggatatgatgtgctgatgatccgggagagcggcgatgtccagttggacaatatagccaggactgtcatagccaataatgcaagcgactgccacattgctcttcactgggattccaccaccaataacaagggggcattttacatgagcgttcccaatgtggaatcctaccggaacatggaacccgtaaaatctcactggcagcagcacaatgcccttggcgaaagcctggtggcaggtcttaagggggcgggagtcaagatattctccggcggctccatggccatggatctgacccagacttccttctccactgtgccgtccgtggatatagagctgggagacaaggcttccgaccattctgcggccacgctgactacgctggctgacggcctggtggctggggtgaaccagtattttgggcagtgaggacagaaaaaaatgagaaaaacgatgatttgaattagggaatagaaggagggctaaaaccctcctttttccagacaatcaactgcaaactgagcgaatacagcggccatcccgggtatcacggattcctccagcataaagctgctgctgtggagtccaaacgttccctgatttttttcagttgcaatgccggcatatacataggctcccggaacacgggccacatattcactgaaatcctctcctccaagatgagattggtatccagtttgacatgttcttcacctaatatcctggcagctcactgaaggcagaatcttacacagcacccttgccgctgtttcaggaagacgtcgggatacgatttgctgtaaaccggaataaatctgattcgttatggcaatggggtctatgcactcatggggccaggaaccatgaccgccttgccctgtcacctgtatttcaaatcttccaggatatccaaaggcacatctctctgtcacacacatttctcccgccgctgcttctggccatgcatgggcggcaaaaacagcgtctacagcagaattttccagtatgcggtcttcctcaaccatttttcttccaccaattccattttcctcaccgggctggaatacaaatttcacgtgaccggaaaactggctgcgcagctttgacagaatcattgcactgcctaaaagccacgcagcatgtccgtcgtgtccgcatgcgtgcattatgccaggtgtttctgacgaaaagggaagtccggttttttcttctatgggcagcgcgtcgatatctgcacgcagaagaactgtttttccagcgccctttgctcctgtcaggctgccgacgaccccggtaccgccggcagcccctgtaatcacctccatcccttccagattgcgtaacttctcagcaattttatgggatgtttcatactcctccatagagagttccggatggcagtggagttcacggcgaaattggattatttcttctctgcattgttctgctttttctttgatttgttcggtcagcatcagcttcctccctgagttggaatagaatgtaataggccccacagacagtgaggccggtatagttgactttatttgcttacgaaatttaaaaactggcgcagccttggattttcagggttatcaatgagttcctcaggggaaccgtcagccgcaatcataccgttgtccatgaacaatatgcgggttgcaacgtttcttgcgaatttgatttcgtgggtgaccaggaccatggtggaatcctcttcggccagccggcgaatggtattcagtacttctcccacaagttcgggatccagggcggaagtgggctcgtcgaagagcagaacatccggactgaccgccagggcccgggcaatggccacacgctgctgctgtccgcccgacatcttggccgggtaaaaatccttacggtccagcatgcctactttctctaaaagccgcagggatgtctcctctgcttcagcctttggtctgttatgaacggtcacaagcgcttccatgacattttccaaagctgttttattcttaaatagattatagccctggaataccatggcagattgacgccgcaggttccgtacttccttagaagtatacctggctgcgtccacacgcgcattgccgatctgaatgattcccgtggtgggtatacacagaaagttcaggcagcgcagcagggttgattttccggtacccgatggccccaggatggccactatttcatttttctttatattcaggttaatgtcctttagaacttctgtatcggttccgaatgttttggacagattttctactgtaaccatctgttatttcccttcaactgcagattttcagctgttatttagtgggttgccgttaaccactcgtcgctaataagctgggataaatcctcataaaaccatttagtgatgatttcagaaacggttccatcctcatgcatttcctttaataccacattgatatcatcgcggagtccggctccctcctccgtgtcagcaaaccaccagcctacgttatttccaaacagcttttggtccagtatacgaaattccaggttctgggccctttctgctttttcgatgttggtaactgtattggcataacagtctatgcgcccaagggaacaatcctgaaaacctgcatttgaatcctcataagttacgatttcccaatcataatcaggagccatattctcaactgttgactgggcagcctgtccggctgtcacaccgatggtgtgtccgcgtaaatcatccattgtcttatattcgctgtccggccggactatgatgacctgcgcatccgcatagattgggtcagatgcaatatatgttttcagacgggcttcggtaatggcaaagcagtttgcggctacatccacacggccggtgtttaattccccaaacagggaggccatatctgaaacctgtttcatctcgatggtccatccggtgcgggcttcgatttcagcccaaaggtcagcctcagctcctgtccagtttccctggtcgtcaaccatggaatagggttcgccggtaccggcagtccctactatgacagtgcggctttcagccggttctgtatcattgccggaattgtctgtctttgcatgttcggacgggtttgcctgtgtggctttggcagaggcagcaggctccgggctctggcctgaacagcctgccatggaagcagctgccagggctgccgagataataagagcggttgcttttttgcttttcatatgtttcctccatttgatgaatattataatatataagcaaacggtctaaaaaatagcattgcaccgtttttccaatactttctggaaagccgtgagaatcagtgttataacccagtaaatcaacatgacgcaggcatagcactcaaagaactggaaggtgttggctccttcaatttttgcggcccccatcacgtccctgactccaaccagaaatgccagggaagacattttgaaaagattaatcaggtcattgaatagaggcggaagcgcaacacggattgcctggggtatgacaattctgattgtcatttggaaacctgtcatgccaaaggccatggctgcttccctctgcccctcatccacggaaatcaatgccccgcggatggattctgaaacaaacgctcccatgttcaggctcatgatgaccgcaacagccacggtgggagacatattaagaataagggaacttaagttggccagaccgtaatagaaaaagaacagctgggcggcaaccggtgtaccgcggacaaaggatatccagatttttagaacctggctcacaccctttactttgtaatagctgatgatggcaaagaccattccgatgacaagcgagaaaacggcactgataatggtcagagtcagagtcacattcaacttgcccgcaatatagggaagtgtttgaaagaaatagctccagttaaatttcataccataccccttcgtgatgatttatctttatgtataattaatacagctttgaacagcagacatattatatatcgttaaatacatgaaatccaattgacaaaacctattgggaaattgtgccggatagatattatgaatggtgttaaaattgtaaatgtaaggaaaacgtaaatccttccgcatttacaaataaaacctgatgcgttacaatgaacataacaccaaaggtttgtttaagacaaggagggattacatgagattaatgaaacgtctgctggcagtggttctgggagctgtccttttatgtcccatgaccgcttatgcggcccggtcacaggaagcattggagctgtacaaggcggtggaagccaagaaccagaacatgacggatatgaacgccttttacgatttcaagatgaagatgacaggcagcctgcttgagaatgaaggtatcagtcccattgacatgcggctggagatgaatatgaagatgaatcatatgcaggaccccagtcagctgcgttacatggcatattgccgtatgacaattccggacagtgagcctatcacctattccatgtattatctggacggctatacctacatggatatgccgggacaaaagattaagtaccccatggccatgggcgacatgatgaatcaggccatggcttcgtcaaaggctttcgaggtgccggaggatttggccggagactttaacctgtgggacgagggagagaacaaggtcatcggctataccatcaacgatgccaggatgaacgagtacatgcagatggtactcggctctaccggacttacgggcatgctggacggtcttgatatgaagcttcgcaatatccgcggagagtatgtggtgaatccggccggcgactgcattaagatgcgcctcaagatggatatggatatgaccatgcagggggagaccttcagtgtgagcctggacggcgatgtgggaatcgcggatcccggccagcccgtggatgtacctgttccaaatcctgcggaatataccgagatgcaggcggcagccagttaaaggagatttgagggtatttttaagatagtttcaaaatatgctgaaaatgtctaaaaaaattaacgccaactactacacaaaacacggattttagtgtataatgcagtagttggcatttttttggaggagtacccaagtggctgaagggtctggcttcgaacaccagtaggtcggcagcaccggcgcgagggttcaaatccctcctcctccgtttatgtgacgattctggcatttgctccggccgcagcttttatacaggttacggccgccctccagaaccttcttttcccgtatcagctctgcaatcgcagagccccccgctgacgcgtccaagccactgttcaaaggtttcatcctgataacggtatttgtgtttccagatatcgattcccagccggttttcagctcccagacactcctgtatttccatataattacaccccggattctatatattgtattaaaaacaataatatcacaatatatggcatgattcgagccccgggaagggatgggttaaaaacgcgcaaaaaatgcagccctggtttatcaggactgcatgcggttttcaggaaattcctgagggaaatcatgggtggcgctgtctgcgccgggcaaatcaatttcaggaatgtccccatccccataggtgctgctgtttctgcccggaagctccaggggttcctgtctgccgggctcctgtcttccgggtatctgtattccgtccatgtgccatcatccttccgtaaacatgttttccacgtagttgcgcatatcctcatggctctttatgtttctggccctgtttaccacttgtttctgttccggctccgtaaggccggagaaacggctcatggcttcaggattcatagccaactccatggtaaatccaatgggaagttcatcccgctctatcatattcatcacctcaggattagtatggaaggcggggacggaaaatatgcatggccggattcaggatttaaaaggcacctgtaacggaaccgggaatggtgaactgtacggcgcccatgtaacccggcgccacatcgtattcgttaaatgtaatcacaagttcgccgttttcattgaaataatagctctcatcgcctgtaagtcccttgaaatcctcatccggcatatcggattggtagaagtacatgatggactcatcctttgccatctgttccgccatctggctcttaatgttggtgctgatggcatccagcatttccggacggtcatggaacaggtcctttaaggagatgacatttccggtggccttgtctatggtaaataccttgacgaactgggtaccgctggccatggtaagggtggtatcaatgcggatgcacagatatttgctgttgtctgtcaccacttcatagcgggaatccagaccatagtgcccctctccgttgtcctttgacaattcttcctcatacatggcaatgagctcattgccataatcctctatggatttgtttgccggtacctgggcaccctcggtcccttcaatcgtcacctggggaaccttgatatcagcctcaaaatgattctttttatcttcataagtgcggaaggttaccacctttgcgatggatccaatgaccggaatctgttccatggcattggccagggccggtgtggcgttggccagtacggtaatggcaatcatggcagcggcagcggccccgcctgtcttctttgcaaatttcataataatcacgcctttctgttctttttttgcctgggcaatgcccgcaagcatgcgttcctttgcttcctttggaacaggtatgctttcatattctgatttcaggttatccatctgtctgttttcttcctgtttcatgagcatggctcctttctgaaaaatggttctggtttccgcccaaagactccggctccagttccagccttagcttttttaaggtgcggtatagcctggcctttactgtgttgagattttcacctactatatcagcaatctcttctaatttaagatcctcaaaataccgcagtaggatgacagtcctgcttttgtcatccagccggtttatcatctgtttcaagtccaggtcctggtaatggtcctccgtgggtgtttccggcatttcttctgtgggtgtttctttctttttcctgcgcagcatatccaggcttgtgttgactacgatccggtaaatccatgtggacaggtagtctttatttctgacccctttgcagtccttaattgcccggtaggcgctttcctggactacatcaagggcatcatcttggtttcgcattagcttatatgccaggcggtagtagcgttcataattttccgtaaggagacgttctgtttccgccgtgtggttgtaaaagcccatgtacctgcatcctcctttcatatccttctgactgttagacgtctggggcagggataaagttgcgtctgttttatgattttacggattgtttcataaaatgcaacatccattgtgttttaagctgaaaaatgttatattgttcatgtgacagaatctgtggaacatgaattaacgaaaggtgtacgaaaggatgagagaggaacggactaacgatatagatgggatgagagattacgaagatatccggcaggtaccgctggagccgggccggccggcgtctggccggcagaatcctcctgtgggggattcctacataggaggcaggcccagacgtgagcgggtttccagaagaaagcccggtatgggagatacgggaccgggggccggaaagcctgctgccggaacggcgcaggaggaccagaacaccagaaagaagactgaacggtctcaaaggaataaaaaaacaggaaattcaggttcaggtgaacgccgtaaccgttcggggaaaggcgtgtccttcctggcgcttttgctggtgctggtgttgggcgcaggcgccggtcttggcggaggttattacctctggggctgggagaggccctataccgtggatttgaaggcagtggaagtgccggattatgtagagcaggatttcataaggaagaatatattttccaggccggatgtggggcgtcagaaggtggataagattgtcatacactatgtggctaatcccggctccacggccaggaataacagggactattttgacagcctggctgaccaggacccgcaaaaaagcggttcgtctgccagcagccattttgtagtgggtctggaaggagaagttatccagtgcattcctgtcaatgagattgcctatgccaatgcccctttaaacaacacgacggttgccattgaggtgtgccatccggacgacagcggaaagttcaatgatgccacctatgaatccctggtggatttgacggccttcctctgcagacagctgaaactgacgcctggggacgtcatacgccactatgatgtaaatgaaaaactctgtcctaagtattatgtggagcacgaggacgcatgggagcggttccagaaggatgtaaaggcagccatgaaaacagaaagcgcgggatgaggtgcataaacggtataaatgcggcaaatcctatatcatcgccgctcgcagccattccccggctaaagaggaatgaattccggctttctgccatggtacacggtaaaatatttataaccgcagtccagcagcagttcgcggcaggtgtcaaaggcataacccacatattccggggtatgggcgtcggatccaatggttatcatctcgccgcccagctcccggtagcgcatgagaatcttccggcagggattgggctggcccaggccgtacttaaaaccgcctgtgttgcactccagagatttgccgttttcaataagaatctttaagagcgggtcaatccaccggctcagatgccggtagtcgtaaaagtcgttctggtggggagcgtagcgcaccgcgtaatccagatggccaaaggaatcaaaggtatggcacaggtctctgacacgcgccagggaggcttcaaagaaatcctcaaagccggtcacctcgccctgcctgttccagtattccggatcgtatgggtccatgctctttacaaaatggctggatccgatgatgaaatcaaaggaatccccataacgctttacaaagtgctccaaatattctttaagatgctcctgaagccccagctcgattccaatgttgatgcggatacggtccctgtaatctgcccggagcatgcgcagggccgtgagataggcgggtatatccaggataaaatcacagtcgcagaatccagaatcgtagtcgtggtggtcggtaatgcacatctccttcatgccaagttctatggctttctcaatctgcaggctgatggaggtgttggagtcaccggaaaattcagtgtgcagatggcagtcgtatatcattggagcctctcctttgcttctatcgcatttcataacaacattatagcagaaaatacccgaatggcaagattccagtcttttcttcgtataaatagttcaaagatccgtaaaaataaaaaaaggacttgccatttcattagaaattgattacaatagagagaggttgattaatatttaacaataatatattttttaacaaactaggaggaattgaatcatggcagtaaaagtagcgattaatggatttggacgtattggacgtctggctttccgtcagatgttcggagcagaaggttacgatgtagtagctatcaatgacttaaccgatcctaagatgttagctcatctgttaaagtatgatacggcacagggtggatatgccggcgtttacggccagggtctgcacactgttgaggctggagaggattccattactgtagacggcaagaagattaccatctacaaggagccaaaggctgctgatcttccatggggcgaaatcggcgtagacgtggttctggagtgtaccggattctactgctctaaggacaaagctcaggcacacatcgatgcaggcgctaagaaagttgttatctctgctccggcaggcaatgaccttcctactattgtatacagcgttaacgaaaatgtactgacagctgacgacaagattatctccgcagcttcctgtacaacaaactgcttagctcctatggctaaggcactgaatgattacgctcctatccagagcggtatcatgtccaccatccacgcttacacaggcgatcagatgattctggacggaccacacagaaaaggtgatttaagaagagcaagagccggcgcagctaacatcgttcctaactccaccggtgctgctaaggctatcggcctggttattccagagctgaacggcaagttaatcggttccgcacagcgtgtacctgtaccaaccggttccaccaccatcttaacagctgttgttaagaaggccggcgttacaaaggaagacatcaacgcagctatgaaggcagctgccagcgagtcctttggatacaacgaagatgccatcgtatcttccgacattatcggtatgagatttggttctctgttcgacgcaacacagaccatggtagcccagattgctgatgatctgtacgaagtacaggttgtttcatggtatgacaatgagaactcctacacaagccagatggtaaggacaatcaagtactttgctgagttaggctaattgtgacaacaggacagtaatttttaagtagactcatgaagggtccggtcgtttgggccgggccctttgttcgccaaatgtatcaatgactctgaaaggggaaagacatatgttaaacaagaaaacagttgatgatttaaaagatttacagggcaaaaaagtactggtacgctgcgatttcaacgttccgttaaaggaaggcgttatccagaactataaccgtattgacggagccatcccaaccataaagaagcttcttgaccagggcgctaaggttatcctgtgctcccatttaggcaagccaaagggcgagcccgttccggagatgagccttgctcctgttgctcctgctctgagcgaaagactgggcgtagaggttaagtttgtggacgatccaaaggtaacaggacctgagacccggaaggtagccgctgagttaaaggacggagaggtactgctccttcagaatacccgttacaggggtgaggagaccaaattcaaagacggcgatgctgcaagcgaagcttatgcaaaagaactggctgatctgtgcgacggcattttcgtaaatgatgcattcggtactgcccacagggcccactgctccaatgtaggtgttaccagatttaccaaggagaacgtggtaggctacctgatggagaaggaaatcaagttcttagggcaggcagttgagaatccggttcgtccattcgtggccatcctgggcggcgccaaggtttccgacaagattaatgtaatcaacaacctgttagacaaggttgacaccctgattatcggcggcggtatggcttatacctttgcaaaggcacagggccaggaaatcggcaactccttatgcgaggcagataagctggattacgctctggagatgattaagaaggcagaggaaaagggcgttaagctgcttcttcctgttgaccatgtggaaggaaaggaattctccaacgatacagagcataaagtagtggatgtgatcgatgcgggctggtcaggatttgacatcggacctaaaaccatcgcgctttataaggaagcattacagggcgccaagaccgttgtgtggaacggacctatgggcgtgtttgagttctccaacttcgcagaaggcacactggaagtatgccgcgcggttgctgacctggcagatgccaccactgtaatcggcggcggcgactctgtcaacgctgtgaagagactgggctttgctgataagatgacccacatctccaccggcggcggcgcttccctggaattcctggagggcaaggaactgccaggcgtggctgcagctgacaacaaagcttaattcgggtttcccataaatgatttcagtgtgaaagggagaggtaaactacaatgtcaagaaagaaaattatagcaggcaactggaagatgaacatgactccgtcagaggcagttgcccttgtaaacgagttaaagccattggtagtgaatgaggatgtggacgtggtattctgtgtgcctgccattgacatcattcctgctatggaagcagccaagggaaccaatatctatatcggagccgagaatatgtactatgaggagaagggcgcttacacaggcgagatttcccccaatatgctggtagacgccggcgttaagtacgtaatcatcggccattccgagagacgcgagtatttcgcggagacagatgagaccgtgaacaaaaaggtgttaaaggcctttgaacacggcatcacaccgattgtctgctgcggggagacactgacacagagggagcagggaatcaccattgactggattcgccagcagattaagattgcgttcctgaatgtgacagctgaccaggctaagactgcagttattgcttacgagcccatctgggcaatcggcactggcaaggtggctaccacagagcaggctgaggaagtttgcgcagccatccgtggatgcattggggagatttatgatgaggctacagctgaggcaatccgtatccagtacggcggctctgtatccgcatcctccgctccggagcttttcgaacagccggatatcgatggaggactggtaggcggcgcttccttaaagcctgactttggcaagattgtaaattacaacaagtaatagcggaatgtgtgccctgcccctgaccggagcgtgtcccaacgcgggattcacgcgccctaaggcggcagggcatttaaaacagaaggagattgaaaatgagcaaaaaaccaaccgtattaatgattctggacggctacggactgaacgataactgcgaacacaacgctgtatgcgagggcaaaaccccggttatggaccagcttatgagccagtgcccctttgtaaagggagaggccagcggcatggcagtgggacttccggaaggacagatgggcaactctgaggtaggacatctgaacatgggagcaggccgtatcgtataccaggaactgaccagaatcacaaagtccattcaggacggggactttttccggattccggagtttctcacagcagttgaaaactgcaaaaaacatgattctgcccttcatatgttcggactggtgtctgacggcggcgtacacagccacaacacccacatctacggcctgctggagctggcgaagaagaacggcttaaagaaggtgtatgtacactgcttcctggatggccgcgatacacctcctgaatcaggaaaaggctttgtggagcagctggaagcaaagatgaaggaaattggcataggcgaggtggcttctgtcatgggacgttactatgccatggaccgtgataagagatgggaccgcgtggaacaggcttacagcgctctgacaaagggcgaaggaaatcaggctgaaagcgctgcggcaggcatccaggcttcctatgacaatgataaggcggatgagttcgtcatcccctttgtggtcatgaaggacggcaagcctgtggcgactatccaggacaaggattccgtgattttctacaacttccgtccggaccgcgcaagggagattacccgcgcattctgcgacgacagctttgacggcttcccgagggagaaaagactggacctggtgtatgtatgctttacggattatgacgagaccatccagaacaagctggttgcatttaaaaaggagagcatcaccaatacctttggcgagttcctggcagctcaccaaaagactcaggtaaggattgcggagacagagaaatatgctcatgtgaccttcttcttcaacggcggcgtggaagaaccaaacgagggtgaggaccgcatcctggttccttctccaaaggaggttgccacctatgatttaaaacccgagatgagcgctaatggcgtgtgtgataagctggtggaagccatcaaatccggcaaatacgatgttatcatcatcaattttgccaaccctgacatggtaggccataccggagttgaggacgcagccatcaaggccattgagaccgtggacgcctgcgtgggccgtgcggtggaggccgtcaaggaagtggacggcgtcatgttcatctgcgcggaccatggaaacgcagagcagctggtggactatgagacaggcgaaccatttaccgcccataccaccaacccggtaccgttcatcctggtaaatgcggacccatcctataagctgcgtgagggcggcgcactgtgcgatatcgtgcctacccttatcgaactcatgggaatggagcagcctaaggaaatgacaggaacatcactgctggttaggtaagaataattaaataagaatcaatatatgtaaaagccggctccgaatgtgcggagctggcttttttgatctaaaaatgccggggcaggcgccaagtaatcttaaatcattcaggttaccgcatgtctttgagggatttgccgggccggtacagcagtatttgtttctttactgctgtcagaggctttggaccgctgcgtccgttttatgtacagttggttgctctgcatcttctgctttagcggcagaggggccgcttgcagcagccttcccggagacagcctttcccacagcagacttcccaacacccgcctttcccggaacgctaccggataacttgatggaagcctttgcgcaggcaggacccaccatttcatacaaaagcccgctggacagaatgatggtggacagcagctggccgctttctgcggggagtatacgctgtcccagcacagccaggccgatggacacgcctgcctgaggaatcagcgccaggccaaagtaacggcgtatttccggtgaagcgtgggtaaccgcggcgcccagggcagagccggtgtattttccggcaatgcggaccagaaagtaaacaatgccgatcacgccggcggccgccaggctggggacggaaagcctcatgccggaaagcacgaagaacatcaccaggaggggaggcgtgaactggtttaactgcttgaacaggtgtttgttgccgctggcattgatataagcggtgccggaggccatacatgccaacaggggagaaacatcaagggaagtacagataccggccacgcccatgatagtgacgcaggccagaaccaggctgtggtctttgctgcggcgtttgtgtatcagcctgctgagcaccacaccggataatccgcccagcgccagcgccaataagttaaagagcaccggaaaagcaatctgggaaaccgtcacagagccgctggaggaactggcctggacaaaggccgcgcacacgctgaaggctatcagggagaccgcatcgtccagggcaactgcctgcaggatagtgtccacaaacggccctctggccttatactgccggatagtcataatggtggaggcaggggccgtggcgcagccaatggctcctaaaagcagactgaaggacagggataacccaataatcagcataacaattgtgatgaagatacctgcggtcagggattcaaacagggtcagaatcaccatgttttttccgttggctttcagggatgacagtttaaaatattttcctactccaaatgcgatgaatgccagggcaaggtccgtgatgaaatccatctgttcaatatattgtgaagggacaaggttcaggcaccagggcccgatgatgactcccgcaataatataaccggtaacgttaggaagatgaagctgttttgtgattcgtgtcaacagaaagccggatgccagcatgactgctatggccaatataattcctgctgctcccaggtttgataaaaatagtgccataatcagcactcctttctgcgttttttttgttttgcttgattatagtagtgtttggtgataaaatcaaatgatattatttgattgggatataaaaaatatttatatactgaggggggacgggcccgtgtttgacatgaaagtaaagacccttctggctgtcatcgaagccggaagctatacaaaggcagctcagaagctgaatctgacccagccggcggtgagtcatcagattcgcctgctggaaaatgagttcgatataaaaatattttataggagcaaaaacaaactaaagctgaccccccaggggaagatactggtgcagtacgcccgcagggcggcggccgtctattccaatgcctgtcaggccattgcggacagcaagacggagaccagccacctgaatgtaggcatcactcccacggcaggagagaccatcattccccaggtgctggccaccctctgcaatgagaatccggatatacatataaatatttgtgtcaataccattcaaaaaatttatagccgcctgaaggcatatgaactggattttgccgtggtggagggcggggtgccggatacggcgctggtgtccaccaccctggacacggattacctgtgtctggctgtctcgcccatgcaccgcctggccagggccaagaccgtgtccgtggaggaaatacgccatgaaaagctgattctgcgcagccgcagtgcaggcacaaggcagctgtttgagaagcatctgggcgccaggaacatgagcctggcagagtttaacgtgatgatggagctggataatgtgtccatgattaaagagctggtaaccatggatttgggaattaccatcattgccaaaagcgcctgccgcgaggaattggccagcggccgtctggccattattcccattgaaaattcctccatggtgcgccagattgacatggtataccagaaagatttcctgcatcctgagcttatccggaatatccggggtatttatgaacagctgaaggcaaagtgatgtttactgatatggtatgatactaacaagaaatagagagacaaaggtgcttttggaggatgggctgaccataggaggcagatcactgcgagatgtattggaagcggtggggcatgcgaaagcctatgagtttatgttcactttgctaaaaagtcgccgcatagatgaagaagtggtgctctatatgcataggttgttctattggaatatagaaccagactatgcaggccgatatcgagatattcaggttatcatcacaggttcccattattcaaccacaccaccagatagactggacaaggagatgagagggctgtttgaatgggtgtctaagaaaagagagcgattccacccagtggaatttgctgccgagctgcaccggcgttgtgtatttatccatccgttcaaggacgggaatggcagagtggctcgtcttttggtgaatcttgcgttgattcaagatggatatcttccggcagtcatcccgccaatccttcgtaaggattatgtatctttgttggaacgggcgcatcgggaggctcatgattttatagaatttattgcagaacgggagctggaatctcagaaggaaatcctgcggctgtttcagatccctttccctaaaatggagtctggaatgtcaggaatggaaatgaaatgaagaaatagattgactgtgtgtcggacaaagaaataggtccggcactcttttgtatcctataagtgcaagagatgaagcataggatttgtgctttgccttctgcacttattttttgaggcgctgaccaggacgttggaaaagatggaccagaaggaatcccagtggaggcaagggtagccctgctttttccatgtcgatggggatgtaggaggaacgaatgagcaaagtaaaaatcgatattgcctatggcagcaatctaaatctgccgcagatggcgaagcgctgtccctcggcaagggtgcttggaacgtctgaaattaaggattacaagctgttacttcggggatcacgcacaggctcctatgccacgatagaaccctgtgaagcctcgccttttatggaaatcaccattgacgatatatcgggaatccgatataatggtagtggtgatgaaaatgacaataaatgaaatgataaaagaaaaaggaatgtcccgatacagcttatccaaaagaagcggtattccctgggcaacactctcagacatctgctccggtaaaacaagcttgacgcggtgcaatgcgcagacgcttcaaaagctggcaactgcctttacaatgaccatcgaggaggtgctgacactcacagcagaatccgaacaacatcaggaggacggcaaaccgcaggatcgttcctacttggaatccaacctgtctgcccatctgcaaaaagcaatcggcgattatatacagggggaaaaagatgaagtgacctatatggactgcctatggggagagctgtatggttcgattaatgccgacctttgggcaggagtcatatcggaggaacaggcaaattatctgagggcgaaatatctttatgaagaacaggagtgagcgtgtgaaaaagaattttcacactgcaattggtgccaaattgcaaaaggaaaggagatttaaatgatagattttacaggctgccctgtcaataagtttaaagggtacggaggtgccaatggcaataaaatcaacatcgaatataacggcgtaagctatatgctgaagtttccaccggtgccgtcaaaaaacaaggcgatgagttataccaacagctgtatcagcgaatatcttgcctgccatatctttgaaagccttggatttaccgtgcaggaaaccctccttggcacttataccgacaagcgcggcaaggaaaaaatcgtggttgcctgcagggattttactgccggcggcaaaaggctgatggagtttgcccatctgaaaaacacctgtgtggacagcgagcaaagcggctacggcaccgagctttcctccattctgaaagcgatagaggaacaatcccttgtagaaccccaaaagctgaaagacttcttttgggatatgtttgtagccgatgctttccttggcaacttcgaccgccacaatggtaactggggagttttgattgatgagcagaacaagtgcgctgacattgctcccatctatgactgcggctcctgcctctatccacagatggatgaaattggaatgcagaaggtgttgggagatgaaaaagaaatccatcagcgtgtttatctgttcccgacctcggctattttggaacaggggaaaaagataccctactttgattatatttcttccctgaaaaacgaggattgcaatcaggcactgcagcggattgcagatcgaattgacatggatcggctctatgccttggtagaggaagcaccgtttattaccgaactgcaaaaggatttttacaggattatgctgtcagaaagaaaagcaaaaatcttggactacagcatggaactgtttcttgggcatgaaattacccaaaaggaacggcaggacccatatcaactacagctcttgtgaaaaaggcggcggcaacagctcttaccgatgagcgattgcgaaaaggcagggcatggaccatcggactgctcctctcgcctgttattttaatccctatgttaatctgctccctgctttcgggaactgacgatcacaataacatggtgatagacttatgctttaacggtggagtgatttcgggcaatgtctccgaggattaccggggatactgaagatatgcgtgatagtatatcacctatgaggaacgatgataagattgccagggaggcgagggagaaggaagctcgtccgaaaagaccaaggccggaagccagaacggtgaatcattcgcaggagatttccggggagatcagttagaggctgcatgataaggagatgggagaaatgaactatttagagatcacagtatggatggaggagcatcaataccatgcgttggctgaccgcctggaagatgattctaccatggagaaggtagtggatagatcatgcagaagctgtatgaaaaatgtgtcccggctgaggagagggagcgtatcgagaaaatcattgtccagaaggaggttaggcggaagtcagaagaagctgccagccgccgctttgttttcattgaggcaaagaagaatggggtgaccagctgcaggattggggaagggtatgggactccacttgaagtggccctgacctgtcggcgcctgtcccaaaggagaaggccatggagatgacggtggagcagtacggcttctgcccggatatagaccagaactttgaagagcttggagccttggccgacaccctgcggcagtccactgtctggtacttctggtgggattgatgggagatgtggtggatgccggaatatcagaaacatacatcgaattgaaaaaacagtttgttgcgtccgatagcggcccggacagtgtccgcgccctctatgcctttaaggaggagctggagcagacggaggacaaacaagacaaggaagtgctgatggatgtgtacgacctgccggacttcaaaaggggcgcctacgacctgctctgtcaaatcgaggaccgctacgcctgtgtgaagcgctttggaaaacggaagcaagaaggaataccctttggagaagacatctttgtgggactaacggaggaatatcatgctggtcaagaagtttgaaagtgtcctgtgtcaactgggcatggagcggctggagcacccactgttttaccatgcgccagtgggaatccggttcggaataggtggggaagagacgatatatttagatggaaaaccaaatcccgtctatgttcagggtgcgctggaccgggcggcggcgatttatcggagccttccgatcccaccagatatcctgcggatcgatggatatcccgaagaagaaacagatgattctgtcctgaccacggttcggaagatggccgggcttcctgtcccccaggagcaggaagcatctgtggagttggatgaagacggcgatgcccataggcagatccgcttttattgggacctgaagtgtgtttcgttctgtccggaacagcttatccgggagattatcctgggggacatcggcggttggtccggctttacgtccagtgtttatctggcaggtcctggccccttcatctaccacctgtacgatgaccggggactggatgtgctgggcggttcacaggaactgctgctgcctctctaccgccaattccatggctggatcttagagtatgatctggagcagatcgaccgcctgttcgcttcagaagactaaccaccccggcagaaatttaccattgacggccgccttttgaaataatatttgaagacggaaggagccgggcacagctgcactctggaacggcgctgatacacagataaggagacatctactgtgggactggatatctacgctgggacgttgccccggtactattcgaataaccggaagaccgctgtccagcaatgggcagcggcaaacggctacatctttcagaaaataactccgtatggacaggacgcggcagacgcgaagaaactgagccctgctgaggtccaggattttgtggagaatgggcgggaacagatatcggccgcaatatcccagctggaaaaacctccctatgcccatagactgaggataacgggaagccctactataccgaccagctgggctgggacgattgtggtaccatgctgtttgtggctgcttgccatacccataatgatacggtttcgcctattgtggagaaggaatgggatgtcatggagcatcccatggtcgtccggtttgaagaggatcaggagccggataagctcaataagctggcgtggcaggccgatgaggaaaccattttgaactggatcgaaacagagggatattcggtggacgggcctgttgagcaaaacgggaaatatagtaaagcggacctctcggagtatccccggtatggcacggaagccttggagcagtttgccttctccacgctctgtaaggtcatgcagtttgaagaaaagcagctggtgcctgttgtgctggatgactcaggagagtttttatgggatatgatgtgagcttgtacccaattgcctcggcctgtttcagcagaatgaatcgatgaaaaagagaatagaaaaatcatcatcaatccatgcactgtctgcaatgttttccacatatctatggatgtgatccacaaaataatcatgccgattcctaaaagagctagctaataatatgggcaataggtatacaattccgatacatacctcatcccacccagcttttataagcgtaaatttataacaaatcctccagtgtttttccataaaaataatcatgcaccattttatcaaactctgcccacatgggaagagttttacatgtggcggccctgctgcagggtttggcgtccttggaaagacatgcaacagtagcaagcgatccctccattaattccaatatctcacctactggatattcttccggcttacggcaaagtttgtacccgcctccacgtcccccaagcccgatcagcatcttttctttgataagctcttttacaataatctccaggtattttttggaaatttcctgccgctctgccacttctttcaagggaatgtatccttcaccaccatgttctgccagatctatcatgacacgaagagcatagcgtccttttgttgaaatcataccatacaccgtcctttctgtaatttatgcctattataccgcggggtgaatgggtaaatcaatgattttcaaaaatttcaaaatcgcccattgacatagtaggcaattggtgatactataagtgcatcggttttgagctgattatcaggaaaggaggcgaaagcaatgaccggattatatacccttaaagttcatactgtcatgtgttgtcgaatgcggaactcccgggcatattatatggctggggtatggttatgcgcagattgcagcatagctaactgcctcgatacaatgcttgattgatctgtcagcatatcgtatgccattggcccgggagcttgtgatgagcttccggttttttatttgccgaaaccggaacagcagccgagtgaaccgaaaaatattaatccaaaggagatcacaaaaatgagtgaatataaaaacggatacaaatttgaaaccctgcagcttcacgttggacaggagcaggccgattctgccaccggttccagagcagttcccatttaccagaccacctcttatgtgttccataatgccgcacacgctgcagcacgcttcgggcttacagatgcaggcaatatttatggacgcctgacaaactcaacgcaggacgtactggaaaagcggcttgccgcgcttgaaggcggcgctgctgcactggcaaccgcatctggtgctgccgcaatcacctataccattcaggctctggcacaagccggcgatcacattgtagcacagaagacaatctatggcggcagctataatctgctggcacacacacttcctcagttcggagtcaccgcaacctttgtggatgcccataaccttgaagaactgaccgccgccatacagacaaataccaaagctgtctacctggaaacgctgggcaacccaaacagcgatatcccggacattgatgcaatcgcagaaattgctcatgcacacggtctgcctcttgtgattgataacacctttggcacaccatacctcatccgcccgattgaacacggagcagatatcgtagtccattccgccaccaagttcatcggcggccatggaactaccctgggtggtattatcgtggattccggcaattttgactggaaagccagtggtaaatacgctcctatcgcaaaacccaaccccagctatcatggtgtctcttttgtggatgcggcaggcccggcggccttcgtcacctatatccgtgccattcttcttcgcgatacaggtgcaactctttcccccttcaacgcattcctgcttttgcagggcgtggaaaccctttccctacgcctggaacgtcatgcagaaaatacaaagaaagtggtggaatatctggtcaatcatccgcaggtggaaaaagtcaatcatcccagcctgccggatcatcccaaccacgcattgtacacgaagtatttccccaatggaggagccagcatcttcacctttgagattaagggcggccaggaggaagcctggaggtttatggacaatctgaaaatcttctccctgcttgccaatgtagccgatgtaaagagcctcgtaatccacccggccagtaccacccattcccaactctccccggaagaattgctggaacagggcattaagccgaataccatccgcctgtccatcggcacagagcatattgatgatattatcgcggacttagagaatgggtttgcttcattaaaataagtgatgtgaatgaaattgaggcaaaaggaggaggctggcttgagctgggaaattatcgggaaatatttgccgttgtaccaaaaagcggcggtactgacagtaaaaatcggatttattgggatagcggccgccattacgattgggttactatgcactatcattcagtattataagattccggtcatccgcaggattgtatctgtatacattgaaatcagccggaacacgcctcttatggtgcagttgttcttcatctattatggcctgcccaaaattggtattcagacagatgccgctgcgtgcggtgtcgcagggctggcttttcttggcgggagctatatgtcagaagcatttcgcagtgggattgaggcgattgcgccaatccaagaggaaagcgcatatagtctcgggctaagtaaactgcagactttttcttatgtaattttgccgcaggcattttccatcagcgttccggcatttatggcgaatgtgatttttttattgaaagaaaccagcgtattctctgccataagcctgatggatttaatgtttacagcaaaggatctgattggactgtattacaaaactgcggagagccttttcctgttagtgatgttctatcttattattttgcttccggtttccgttttgggaagcctcctggaaaggaggtcacgctatgccggatttgggtcttgaggtgctgctgaaagggaaaaatcttgcacgtattcttggcggattagacgcggcactcaaaatcagtatgatttccgtcgccatcagtatcccattgggaatcattttgggcattctcatgacatggaaaaatccaatctgccgggcgatcctgcgatgttatctggaatttgtccggattatgccgcagatggtgttactgttcctcgtctatttcggtactacgagagcctttggctgggacttgtccggggagttggcatccatgatcgtattcacagtctggggaacggctgaaatgagcgatctggtccggggtgcgcttattagtattcccatacaccagtatgaaagtgccgaagcactggggctaacaggaatgcaaagctatcggtatattattctgccacaggtcgtgcgaaggttgatcccactgtcaatcaacctcattacaaggatgattaaaaccacaagcctgatcctgatgatcggcgttgtggaggtactgaaggttgcccaacagattatagaggcaaaccgaatgagtagtcccaatgctgcatttggaatttacttaacggtattatttttatattttattgcctgctggccaatcagccttttggcaaaataccttgagaaacaatggaggtgatgagatgtcggaatcggtattaactatagagcatctgacaaaacaatttgacaattctactgttctcaatgatttaagcctgcagattcacgagggtgaggctgttgtgattgtcggccccagcggatgcggaaaaagtacactgctgcggtgtatcaatgccctggagaatattcagagtggtgagatccggctgcatggggagcttgtcacgaagcgaagcagaaacttaaccggaattcgccaaaagatcggtatggtattccagagctatgagctgttcccgcacttgaacgtgctggataatatcctgctggcaccgaccaaagtgcagaaaaggacaaaggacgaggtaaaaaaagaagctcttgcacttttgtcccgtgttggccttgcggaaaaagcgaaaagttttccacggcagttatctggtggacagaaacaacgggttgcgattgtccgtgcattatgtatgcaccctgaaattctgctgtttgatgaggtaacagcagcacttgacccggagatggtcagagaagtattggaggttatcttaaaccttgctgaccagggacggacgatgataatcgtcactcatgaaatgcagtttgcaagggcggtggctgacaggattatctttctggatgatggagaaatcaatgaggaagggacaccggatcagtttttcgatgcgccgagaactgaccgggcaaaaaagtttttgcaaacatttacctttgagcggaaaggttcaaagcaaaactgatatagggcgatgcccggaatggagatcatgatgaaaaatattcgtaagcttgtaaccgttgtactcactctttcgctgacgctttctctggctgcctgtggatcagagaattcttcaaatggcagcgtgacagccgacagagaaaaaaaccagaatgttgtttaccgtactttggacgaaattaaggagagcggcaccattaacatcggcgttttctctgacaagaacccattcggctatgtagatgaaaatggggagtatcagggctatgatgtgtactttgccaaccgcatcggtgaagatctcggcgtgaaaatcaactatatatccaccgaggcggctaaccgtatcgaatatctgcagactggtaaggcagatatcattctggcaaacttcacagtaacacctcagcgtgctgaagaagtagatttcgcacttccatatatgaatgttgcactaggagtcgtttctccagacagccgtgtgattgagagcctggatagctggaatgcggaggatcaaatcattgtcatttccggcacaaccgcagaaacctatctgattgaaaactatccggatatcccactgcagaagtatgactcttatgcaactgcaaagaatgccctggaaaacgggaacggagtagcgtgggtaaatgataacacagaggttattgcctttgcattgcagaacgatggttacactgtaggaattccatcattgggcagtcaggacagcattgcaccagcagtttccaagggtaataatactcttctggactggttgaatgaggaaatcataagccttggtgaggagcagtttttccatgcagcttataaggcaacattagctgacacctatggtttggactacgaagacagtctggttgttgaaggtggaagaaaaaataaatgatgaaaaatatactggcttttggcgactccaatacctgggggctgattccaggcactcatgaacgatatccatggggaaaacgctggacaagtatcttacagaaaatcaaaaaagcagaactcaacgggcctcacataactgcggcaccataattgtcagggtactggacattgggcgtttacgtgccgtctgggacttgtaagaggcagttacattccatgcgaataatttacattttacgtgaatatgcaaggcatagttataagcctgtttcctgccgttccaacgaaaagaactgatatcagaatactcttaccgtttgcaatattgcgttagattctgttgtttatgatatattgggacggtcattcacatccatcattcaatacctgattgaacagacggggggggggagtctgttagccatgaatcattgtaatcgcgcgtgattctcattgtcatcttccaggcggtgcctagcagtgaagaaaggactccgggcgatttatacaattgatatacaagaaaatttgctggaaaagcagcaacaaaaggctatcaaacaggaatagaagtgagtgtgtgaagaaaagggcctgttgacaaactaaagaaaaaggaccttctgtatggtataattcttaaggaaagtatcagattcagagcgacaaaaaaatgaacagcttatgcaaaagataaactgctctgaatgtgattctttccaattgtaccaagtcgcggaactttagccataggctgtatggggatagtatttccccagggaagcttaaaatagtggattatggtggtctgcaatgcagaagcaggacgattttagctgtatcccatatttttgggtatgcttcgcagacctcccgatggcaggtcttaaaaaatatataggaaagcagcctgtcaggaagaaggaacatgacaccttcccagctgtttcatggctgtatgaccacattcaggacacacacagatatcgaaattccagactgcttttaaaagctctgccagggacattccggcgtaacgctgcttgaaacgctgtccattctgaagcttaaagataaccttcagattcttatatttcatccgattgttcagaaaaccataatagcgtattttctgaaagccggaaggcagcacatgcatcaggtaacggcgtataaactccgtgttgccaagagtaatctgacgttttggttcacccggcttttttccacgggcagagaatgttaccgtatcttccgtaacagaaaggatcctgctgttagagatggcgattttgtggatgtagcgtccaaggtattcaatgacattgccgaagccgttgaaggttttcttgatgtaggggcaccagtccatttcataaagcttatttttaaattccttccagtggtaagaattacgcaggttttcacaggaggatgaaaagttaagggagccgctttcataaagggagacaaggtgtgccatatatttccccttaaacttatcccgcaggacctccgtacggataaaaaacttagatgaggatttacggatttttccatctccggtaagcccgccgccggaaacaatgcagtgcatatgtacatggtaatccagctcctgattccaagtatgaagtacttggataatcccgggtgttgccccgagccacttcttatcagcagataattccagaagtgtttcggcgcagcatctgtgaagaagtccatacagaagcttctggttgcagtaaatgaggggatttaattcatgtggaagtgtaaacactacatgaaaatagggtgaatcaatgacctcagcactgcgtttatctacccagatttctttcttcacagcctgacagttggggcagttgcggttgcggcaggaattattgtggacttccacatgcccacagtcggtacactgacttaagttgacaccaagccttccggatttgcagtttaagatggctcgggcggctttgcgttggacatccgactgatagtgccccggtgctgagaaagcttcataggactgctcaaatatctgcctgattttgtaatcactcatggtattcacctgccaatcggtcaaaagggctgacggcattgcggatggcattaccggaaagatggacataaatagtggtggaagacaaagatttatgtcccataagcgcttttatggtaagcaggtcggttccgttttcatacagatgggtaccaaaagcatgacgaaaggaatgacaggtaagcctgcgttcccatccgagcctgtcctcatgggcatggatgtgtcttgaaaggaagaatgtgtcgatgggtctgtcctcgccactttgctttggaaaaagaaagccttttggtctgccgtattcaaaccagtagcgtgtcagcaggtcaagtgccgctttagaaagaatggcatagcggtcattcctgtttttggagtgtgtgatgtgaagccgcatgtttttgcggtcaacatcctcgtaacgcagacggcatacttcaccgatacgaagccctgaggaatacatgagtgtaaccatagtcttctgctttaaatcaggtatggaagaaataaactgccatgtttcctgtttcgagggaacatagggaaggtactcgtcaaacttacgcatgggaagctgtgtgtcatcccatgttttgtgaagaacatacatggtgaaaaagcgcagttgtgaaatggcacagttgatggtgcggtcagaaaggtctctggatttctgtagccatttgatgtagtcacgaagttcatcccaggaaacatcttctggcgatttgtgaagaacatttgcgaggtaatccagatacgcccggatgtaagtacagtaatttttaagggtatggtcggtaagaccgcgaagggaaatcatttccctgaaagaatttaaatatttgtccatagtaaaatctcctttgaaatgcaataaaaacagtagttacatttcaaaaagaggtggtggacgagtaaaaaaataagatatatagttgttgagtttagaaatccatgataacataagcatagcagttcttaaagttatgaagttgtttggtgtggtaacttaacaatacatcataaatttaaaaactgctattttttataaaaaaagtggtggttttatgtaccttgggctagccgtcgcactagcgacttggtacaattatcatatcaagtgcgataggtcatttttatgatgggaaaacagactgggtaaattcagatggtaattcttgacatagattctatggttccggagagccatctcctgagccagattaaaaactgtgtaaatctattgattcggttatcctgataaaaatgctgctcattgcttatctttatggaatcaaatcagaacgaaggcttgaagagaaagtgccgtttaaccttgcctactgctggttttttggtgattattacggtgcggcggagcagccagtccgatgtggcaagagccacctgtccggaccaacagagccactccgttttcctggttaatagttactttgacagtgcaggattcagtccatatacctctctcatggaaagatttttggatggatccatactttcaatgtcgatcttatatgaatcgtaggatatgcgatccatgatggcatctgcaagggtgctttcgccaccgcagatctgctgataccattcgctttcgcgaaactaggaacaaaagattgttgaaaatttcttgcgtcttttgtgtatcagttcaaaaaggtttctggcttcggcttctgtcagcttaagaagcagcccctcatcaataatcaacaccactggcttggtgtattttttcaggctctttgtcaatagttggggtgggatttgttaaaatcccgcgccaactctatgacaagtacaccttttatgtatggttccaagttttactgattttggatatgccaaataagcctccgcattaccgaccattttatcctatgatgtacagtggagtattcgagttcggaaacgcttgaagttgcgaattccgtagctgctccgttttaatacttttatcttgttgttgaatccttctgtaggtccatttgtcagcccgtatttaaagacattcaggatttctttgcgccaggccctgtaagtcttggcacagtcctcaaattccttgatcccacagctctgtgcatttgcaatccagtcatcaaattcctgctgttgctggcggtatgccttcatctggcagatatcataaaaccactctttcatgtggtgtgccaaacgcaaatcctcactgtactgaagcatcaggtcacaggcctgtttgttttcatctttcagttttatatagcgggtcagaatgagctttgcgttaggaaagaaggtctgagcaagctctgtataaggccgccacatatcgcagacgaagaacttaacattcaagcgttctttccttggaatgctacgccaatactcagccaggtggctctgggtccggtctgggaggatatcaaggattcgccgtttgttcggctcaaccaggatacactgatatttgccggtggaagcattccctttgaattcgtcaatggagagtgctcgtgggagccggtcaggcggaggagagtgtatggtgtccaggagccggcagaccgtctgggcggaaacaccggtaagttctgcaatctgtttcacggaaaaggtctgacgaagcagggaaaggatgtagaatgcaagtctgcgtgtcctgcggtgatagctaggcaggaacgagcagggttccgtaaaacgtttgtgacaggaagggcagaaatagcgttgtttacgaaggaccaggatgacctgttttccttgtaagggaatatcctgtacctcctgtaagcggtaatcatggacacgtttcgtataagccccacagcaaggacaaatctgtttagtcggtgagacagtataaaaattttaataaaagagtctgcctggacgacttttttatattatagggtgcgcccagctaagggcttgaaatttagtgggtgagagtcccacggtgtaaggtacaagctataccgcatcaagcgagtcttgggtggacagcagcgatgttgcctgctaagcgtagacagcgggattgcagggcatagccgtatatagcttcgatattaaaatgaaattgggaaggcagaagtgctcctatacactgaaagcaacacagctgtagtcgttaagagcgagaatgcagctgcttccccggggttttaaggctggtcatgtaatcaaggattttaagtcaactggggaggtctgccaggctccgggcaggttgcgtaagcccggtatacggaacaacggtagaaaggagaaccgtaaatggccggcagaagtcggatggccgaatagtacacagcaaaaaaaagcggtggaagtcgagagagacctgtcctcgcaggtcagccatgcaaagtcatatcaaagaggaaacataatctgtacgcagagacaggagaaattatggaaacgaaattggcgagaatatcacagttgtcaagcgaacatccggaaatggtatttacgtccatagggcatctgattaataaagagttactgaaagaatgccacaaggagatggatggaaagaaagcggtaggaattgatggaattaccaaagaggactacgaagtaaatttggaagaaaacttagatgaattaatcaggaaaatgaagaagaaggcatacaagcccaaaccggcaaaacgggtggaaataccaaaagaaaatggaaagacccgcccgctcagtatatcctgctatgaggataagttagtacaggaagcgctaaggcgaatactggaagcagtgttcgagccccatttctacgaagaaatgatgggattccgcccaggaaggaactgccacatggcattaaggagactgaatgggatgctggaaagggaaaagacgaattgggtgctggacgcagacattaaagggtttttcgaccatttagaccatgaatggatagtaaagttcatagaatcgcggataaaagacccgaccattatcagactggtaagacggatgctgaaagcgggaatcatgagagatttcagatatgaggagacagaagaaggggcaggccaaggctcggactgctccccggtcatagccaatatatatatgcactatgtgctgatatggtggttcagggagaaagtacagccagtgatgagaggatatgcggggctggtagtctatgcggatgattttgtgggatgcttccaatataaatcagatgcagaaatattttatgaacacttaaagcgcagaatgaagtactttggactagaattggaggaaagcaagacaaggttgattgaatttggccgattcgcagaaagtaaccggaaagaccggggaaaagggaggccggagacgttcacattcctgggattcacgcattactgttcgcatggcaggacgggaaagttcagagtaaagaggaaaaccagtaagaaaaagcttgcaaagaaaagcagggaaataaacgccatgataagagacatgaggtttctggagataaacaggatagtaaagaaactaaatgaagtactgactggttattatcattattacggaattactgacaattcaagaagcctgaactcattcaataatgtggtatggtttaggttattctactggctgaacagaagaagtcagagaaggagctatacgaaggaaggatataaggaactaatgagacagttcccgcttgtgcggccacgtatttatgtcagtatatacggataactgtagatgtattagctttgcagggagccggatgcgggaaagctgcatgtccggttctgagaggggtaagccctgtaaggggcttacctacttaccaaagtccttgctgaaataaagttatgtaaactaatgattctgccaaaggagggtatagaaaacagacggtgatttagaacaggtcgatatagaacccttcttcccatccatcatcgtcgaggtcgtcatcttcagttaaaaagtaatgcatatccaataaatcagaatcggtcatatttctgaccagtttgggtgtcattccttctggaggatttttgatgtatttttgtctgagttcatccacatatctttgattcatttgcaactgcctcccatctgtaataaatgtagtatgaagcagatgggagagaaagtcaagcagagcgggaccggggataaaggccatgccttatccttgtccttttgtataattcatccagaggaacccgttcatgtttatggtacagctctagaaagaccatttcatgtctgcagtttgggcattgcagggggtcgtaccccatggtaagaaggaaaagcttacgccaggtgttgaaatcgaggagaatcctgtgtttggattttgggactgctttatggagctgattgtcaatctcccggtgtctggcataaagcccatagtaccgggtcatcttgaagtttttttcaggtatatgcagaatgagcagcttaatgaaatcaatggcgggaagagtcttttttacaaaagagttgtcttcatgcttattgtaatggaaagtcaccatctccccatcgtaggaatcaatcctggaaagagcaatgacagggcggccaagataacggctgacatatttaataatggattttgggtcgcaaagattgggcttggcataaacgtagaatccatttctgtccctatggtaaacggcggctttcatctttttaaaagagggaccgatgcgtttttccagtttatttaacaaaacagtctgaaaggatttacggaggtaggaataattgaaatatgtgaccttgcgccagacaccatcatcagaaaacccgccttcggtaaggagacagtggatgtgtggattccaaccgggagggcgaccgaaggtatgaaggacacagataaacccagggacaaagtttttggatttgttcagggagaaaaaatattctttgatgacatcagaaacagcctcgaaaaggcagttaagcagagtgcggtcttcgaggaaaaagcggcggagggattcgtcaatggtgaagacgagatggcgatgggtacactgtattaatttaaaagacatagcggtagacctgtcattggaatacttagcgccgcaggaggggcaaaacttggagtggcagcggaaaggaacgaacttgaggttaccgcaatggggacagccatacatggcgccaccataagaaggatccccgcagttaatgaccttatcaatgttttccatgacgacaggtctgggttttatatcgtattcaatgatttcgtaatagtctctgagcatcttctgaatcacattcatgagattattatggaataaaatgacgcaaaaaacaagccctaattcccctcatgaatgaggggccaggggagttgaggtgccgaaggcactttcttgtattcagagaaagactgttgatgtccatggtttgccgcctgtgcaaccgatatgggtacagtcaggattaatgccagcgcctattacccatctttttatcggagcgtgacatttgctgttctaaaacgagaacacaaactgaataagagtaaacgctgtatagcgagtacctttcaattgcagttgaagtctgggataataggcccataattctaaaaacaatcaaaaaagtttagcactcaacttttttgactcatgtcaggaggttgagttatgaaatctcaaacaggtttacctacgatgtactggatattgccgaagcgtaatacggcattctgatgcaggggctggagattgttgccaaacgtcctgtcagggagattgagcatccatcctacgccatgtgatttgtgtagttcgtagaattaaaaaaagtaaaaacatgcgggatttcaataaacactcagatttttcaaagtatataattcgccatttttacgcatctcccagcatgttaattatatcactgcctctacttaaaggaaatgctactgaagctctactgcctaaaggcgatgggttttacattaggcttggaaaataaattcaatatccgtccatcctcacagtttcatttatggtggtgccaggtgtgcgggacatggaatgtttatataaaaattcagttcacatccttgcgaaaataattatatatttaagagaattttagaaataaaaataaaagttatggaataaatagacaaatcataaaggatatatgatagatgatttgtataaataagtgaagattctgaaagaacatttaatataatagcgaagtattgaaaataaattaaaaaataaatatatttataaaaactttattttataatatttgctttacaatattaggcaatatgccaaaggaaggagaaagggaaagaatgaaaaagaaactgttctctttgatttttgcagcgtctataagtatggctcttctagcaggctgcggcggtggacaggagactgcaacaggaacagggataaaagcagaaggaggtacggaagcaatgcctgcgggcgaggcaggagtgctttactctaatggaggacctacagagttctttgaaaccccttggttaaatccgggaacttatatgtataataaaactttgtatgctcgtttactgcttgcagacgagaatttatctcctatatccggtgagggagagctggcttccagctatgaaatggcagaagatggttcttatttaaaattcaccttaagagatgggataacctggcatgatggggcgccaattacagcagaagaaattcaatggaatattgagtatgcgttaaagacaaccgtattaaactccgtatttcgctccgcttttgaagccatagaaggctctggcgcttatttagatggaagtgcggaacatatttccggtattgtagttgacggaaatacgattacgttaaacttcgatagggtagctcctgatgcattgctggtatttacacaatttgcgccattgccgaaaaaatatctggcagatgtggatcctgtgagcctgcagcaggcagagtacttccagcatccgattggttccggcccttttaaagtggaggaggtgcagatggggaattatacaatattggcaccttttgaaggatactacggtggagtggcaaactacaaaatccacttaaatcccagcgccggagattcggatcctaactttgttacaaatgcaaaagctggaaagctggattatgcatacacaaaaaacattgctgacgtgcaggcactagaagggcaggcaggtattacattggataaagtggatgtgcgttatacaaggcttttctatgtgaataaattccctaatgcggatggaactccaggtgctctttcggatattagagtacgccaggcgattgcttatgcaatcgatatggccgctatctgtgaaggcgttatgaatggggcaggcgttcctgccaatagtttaacccctgacggatcggataaggtggatggattaaataattacgattacaatcctgagaaagcaaaacagctattagcggaagtgggctgggattctaatagagagattaaagtagtttactactatacagatcaggcaactcaggatttaatggcagttatccagcagtatcttgcggaagttggaattaagatgaatgcaagcctggtagagggagaccttgcaacaatcctttggaaagcgccggaggatccggtcaatggacctagagcggtagactgggatatgtgttatgcggcaaatgcggcgctgtccttacatgagtactatgacagatacgcaaccggctactctattaattcacacacgcctggcgatccaaagctggatgaattaattgctgcaacaaatgcttctgcagatgcggaggtacagaaaaaggcgttctttgaattgcagaaatacgaaaacgaaacattatttgaaatcccattatattaccagccaatctatttgttacatagtgatagagtagaaggaattgaggcgattggtaatccacagtttaattttaactggggagttcagaactgggttgtaaagtaagataaacaattcaatttgttttatatacgtgtaaggatggggagtgtgtcttaaaagtcgctttagaagcaaaatcataccatatgcagtgtatctcactgttataaaatttctacatggcatgatttctgaatgaaaatgacttttgagacactccctttctttatgagaatgggacgaatcagaaaggaaggctaaacatgcttaagtatacagtgaaaaaaatcctgggaatgattccgatgctgctgattattacctttatcatctattggctgttagatttgacgccaggagatcctacctcttatttaatggatccggaatccctagcccggttaacgaatgaacaaatggcagctttaagggcacagtatggattagatgatccctttgttataagatattttaagtggttgttccgaattttacagggagattttggttatagtacctccagcggagttccggttattcaaattatggcgcaaagacttcctgctacgctggagctggcagtggcggccttattgatttccaccgctcttggaagtattctgggagtgttaggtgctatttataaaggaagcattggagacaatgttctgactgtggcaggtatgattggagtttcgattccccagtttttctttggcgtatgcgctattttaatttttgctttgaatttagggtggctgccggttggagggcgtacggataccaatgcagtaacctttttagatcgtgcaaaatacatggtattaccagctcttgtgctgggagtttctatgactgcgggtgtaatgcgatatgccagaagcagtatgctggatacgatgaataaagattacataaaaactgcaagaagtaaagggataccggaatggagggtaaatctgatacatggattcagggtgtctcttactcctgtaattgtattaattggtttccgcctgccaacgctgatcgcaggttccgtagtaattgaaacagtatttcagtggccaggaataggaagtgcgtttaatactgcagtacgttctcaaaactataacctggttatgatgttagccctgctctttgtatttatgaccttgtttgccagtacctttgttgatattatgacggcggctctggacccaagggtgaagctgaacggataggagggataaaggtgtcaaaacaatccagattaaatcgcaagtttgatagaataaaaagactggaggagtccggtgaattaaaaagaaggaagcaggggaatcgagccttaagaaagcttctgaataaccgcctagccatcgtggggggagctatttttctggttattctgataagctgtatttttgctccctttctggcctcccattctccaacggcagtagatatgaaggctattttaaagatgccttcaggaaatcacccttttggaacggataaattaggaagagatgtatttgccagagtattgtacggaggacgtatgtccatcgctatcggctttggaagcgcgcttggctgtgctgtcattggagttttggcaggatgttacagcggctacaggggagggaggtttgaccagttcatggttcggatttcggagatttttatgtccattccgcagcttattctggttctgatgctggtatcaatcttagggcagagcgcaaagaatattgtaattatatttataatttgcggctggggttcatcctaccgtatggcaagatcccaggtgctgtctatccgtgaggaggaatatgtccagtctttaagggtttttgggctgaatccatttgttatctgttataagcatatcctgccaaatgccttaagtccgattatagtaaatataaccttaagtacggctatgtttattcttgaagaggcggcgctgagttttttaggtctgggcgttcccctggaggttcctacctggggaaatattttaaatgctgctcaggatttatatacgttagaaaatagctggtggttgtggcttccaacgggtattgtggtttctctcttcgttatgagtattaactttttaggtgatggaatccgggatacaaccgatcccacgcagcagggttaggagggcgtaagaatgaagaaagaacaggatgtaattatttcagtgaacaatctgaaaacatatttttataccaaccagcgctgcaataaggcgattaatggagtatctatggaaattaagaggggaaaaactctatgtattgttggagaatccggttgtggaaaaagtgtaacagcaacctctattatgcagcttttaccgaagctttcccgtattgaagagggagaaattatctaccatagtgaagatgggcgtggagatatacatattgaaagcctggaacggaatggaaagcagatgcgttctttgagaggtcatgacattgctatgatctttcaggaccctatgactgccttgaatccggtatataccatcggctggcaaatctgcgagatgatccattctcatgagagggtgacgaaaaaagaagcaagagcaagagcgctacagcttttaaaggatatgggaatcccgaatccggaaaaaaggattgaccaataccctcatgaattttcgggaggtatgcgtcagcgtgctatgattgctatggctatgagctgcaagcctaaggtgttaattgcagatgaaccgactaccgccttggatgtgacgattcaagcgcaaatttttgaattgatgaagcatttaaaggaggaatacaatactgccattatgctgatcacccatgacatgggtgtggtatgtgagttggctgatgacgtggcagttatgtatatgggaaatatcattgaaagcggaacggctcaggaggttttaggctctccggcccacccctatacaaaagcgcttttaaagtcaatccctattttgggaaagggcgcgaaacaagagatttatccgattcagggctccacaccagatccctatgatcgccccagcggctgccagtttgctcccagatgcgagtatgcctgtgcggcatgtgatggaaagatgcctgaggaagccatagtagaggggactcatatggtgcgttgcagcagatataaggaggtgttaacagatgccagataagaaagaaaaacagcctttattaacgattagaggattaaaaaccttctttcctgtaaaaagtggatttctgggtagggcagagtcttacgtgcaggctgtaaacgatatcgatcttaccatttacagaggagagaccctgggattagtaggagaatccggctgcggaaaaactactctgggaaaaacaattttacagctatacaagcctacggcaggtgaaatgatatatgaatttgaggatggttcccgcaatcttgcagaactgaaaaaggatgaaatggatatggccagaagaaagattcaaattgtctttcaggatcctcagtcctccctgaatccctcttttaccatttatcaatccttgtcagatccgttaaaaaagtttggggtcaaaaccaaagcagaacgcagaaaggtgatcggggatttattagaagcagttaatatgcgcagagagtatatggatcgttatcctcatgagttttcagggggtcagagacagcgtataggaatagcaagagctttatgcatcaacccggagcttgtgatttgcgatgaagccgtatcggcccttgacgtatcaattcaggcgcaggttctccagctcttaaaagaattaaaggagaagcataacctaacgtatatctttattacccatgatttaagtgtagtagagtatataagcgatagaatcgcagttatgtatttgggcagaattgtagagcttgcagatgcagatgaattatatcagcatagtattcacccttatacacaggctctgctatctgctataccagtcgcagacattaatcataaaaaggaaagaatcgtattaaagggtgatgttccgtctccaatgaatccgcccagtggctgccatttccatggacgctgccgtatgtgccaggaaatatgcacaacagaaaagcctaagcttcagaaatatattattgaaggaaaggaacattttgtagcgtgtcattttgcaaaggagaatatggaagcatgcgctgtttcagaagaatctatgtagatgtattagtagttggttctggcttagctggtttgacagcagctatttctgcggctgaagagggtgtgagggtagccattatcagcagagggggcctttgctctggttccagcttctatcctggaacttggggattaggcttggtagctccagaggatgaaaaggatgtgccggatctggaagaaacaattttaagaattggagaaggaatggctaatccggctctggttcacaccttcacaggacaaataagggaaagtctggaatacttagagcatttgggagttcccttaagagaggcaaaggcaaataaagagagggaatttataccgtgctttgatcataaaaacaggctttggaagggaattgaaaagcctggaagctctcaaatgatgtcgaagcggttgcgtgaattaaaagtcgcctgtcttgaacatatgacaatcgtaaggctattaaaagaaggagagcgtgtttgcggggctctggccgtcaagagaaaagatgaggggcttagccttgtggaaatactaagtccagcagtgattttagctaccggaggaatgggaggactgtttacacaccgtttgactacagatgatgtgacaggaattggtcaatacctggctttagagtcaggagctaaattgtttaatctggaatttatgcagatgatgctggggcatgtacaccctgcccccaagaccatctataatgaaaagatgttccgattcagccgtttttatggagcagataaggaattattttcggaatgggaaggggaagaaagggagaagcagttagaattaagatccgggtatgggccctttactacacgcctttcgtctaaaaaggtggatctggaaatttataaggaaagccaaaggagaagagagggaattcgcgttgtttatcaagaggaggtaaagcggcatcagcctgagtttataaaaacatattttgactggttaaaggaagaaaaaaatttgaccatggatgatccggtatggttaagcatatatgctcatgcttctaacggtgggattgctattgatgaagaggcatttacgggagtagaaggtctgtatgcctgtggtgaagtaaccggaggcatgcatggggcagataggctgggaggtctgtcttcggccaatgggttggtctttggacgtattgctggtaaggcggcagctcggtctgagagagggaagaaagaaggaaaggcagcatatgcttatcagccgctttatgtcattttggaagctaagaaatatctgaatacgatacaaaaattgaatcaacagcatgccatgctcataaggagcgaaaaaggaagtaagaatgttttacaggaactatcaaagctccaaagtcaaatggaacggaataaaattcccctagaaaagacagattgttccatggaggagctgcttagaagcgtagatttggaggcggctttcgagcttacccttgcgctgcatcaggcgattttgcttcgcagggaaagtagggggcctcattatcgagaggattgtccgaaacgggagaatggtttaaacataccaatctattcatggaaacagaatcaagagatagtaacacatcttcaaatgagcaaatttacgtagcaacgatagaaaggaaacaaagcatgccggcaaaagatatgcctttacagcaattaaaacagtatactggaagtactcccaggccgaaggatttttgggaattttgggagaaaagagcgagggaggcctgggttctgccattggaatatgaactgaaggaagcggaaattccccacaccccgtatactcagtattatgacatatggttaaagggaatggcaggggccaggctccatattaaatatgtaaagcctgttagaaaaagaagggtgcctgtggttctgcagtttcatggatatccaggatcttccagggggtggtttgaacaatccagctttgccggtttagggatggccgttctggctatggactgtccggggcaaggaggcatcagtgaggatctcggcggacggcagggaactactgccgcagatcatattatcatgggggtggatgggccgccggagaagctttattatgtggaggtctttcaggacacctgcctgatggtacgtttggctttagcattagagggattggatacagagcaaatttatgtaaatggagccagtcagggggctggcctaggattggtatgcacagcattaaatgcggcttatataaagcgctgtgcggctctttacccatttctttctgattatcgcagagcatgggagatggatagagatgttatcgtttataatggcctggcttaccatacccgttggtttgatccgatgggagaacacctggatgaatttttcactaaattgggatacattgatgtgcagaattttgtagaacgaattacctgtccggttttatgcggaaccggccttatggatgatgtatgtccgccatctacccagtttgccgtattttccaagatcactgcccggaaaaagcatttgattttctatgaatatggtcatgaggaaattgctgcgtttgataataagattattaacttttttggtaataaggaggatggggtatgcctggaacagatttaagattagaggaattaaatacttatacaggggcctgtcctgctccaaaggattttgcgaagcattggaagcaggtgaaggaacagattggggctttggcttcatctgtctctatggataaattagaaatggaaaccgaggaactagagtattatattattacagttaagacatgggatggatgtcttcttaaagccaaatatatctgcccttccaaaccgggactgcatcctacggtaatacaatttcatgactatcctcaatcctcccgaagctggctgcatttaagccgttatggcgccatcggatatgctgttttggcccctgactgccggggacagggaggaatgagtgaatgtggagaggcagggaaagggccaacagcctgcggccctttatttcatggcctggatggagaagtggaggatctatatctgcacaggctttacgaagatgcgctgctgtggacggaggttgcaaaaggattaaaaaagaccgatggagtccatatggctgtatacggagaaggtcagggaggagcactggctatagcatgcgcagccctctatccggaagtggagaaatgcgctagccaatatccgatgctctgtgactataagagaatctgggaaaaggatttttcggaagggccttatatggggttattttattatttcaaatggcaggaccctatgcatgaaaaggaacaggagatctttgataagctggcttatgtggacgcgaaaaattttgccccattgcttcgcaataaggtattaattggtattggcctgcaggatgtgaatacaccgccgtcttctcaatttgcccttgctaatgggattgcttgtgacaacaggtgctgtgtatatccaaatcatggtcacgaattaaacaatttttttgaaaatgagcacttgaactttttaatagaccagcaagctgccttttcagtcaggagtgttcttggtttagaacagtcggatgtttctgcctgatttgttgtgatataaaatgaacttcatattttatgttgataatcagcaagacctacggtaaaatgaggcaaacttcatattaagcctgctaataaagagggtgactatatagatagttttttttaagatttcccgtatctgggtggcaaacagatggattatcattacaaacagcatatggcgggggagcatcccaaggaggacctgttgacaaatccattttctaaggaatttttgtatgctgtctctcacggaacacaatagaacggctggtaaatccggattactcacaccgcttttaccagtcttttaaggtttaatgctgttgccgataagaggcattcttccgtcgctttttggaggccctttttctgtattttattcagttggaataatagggggatgtcttttcatatatgaaatcaaagtttacacagtttttaatttgtctcaggagatggctctctggaaccatagaatctatgtcaagaattaccatctgaatctgcccagtatgttttcccatcataacgggagtgcatcgttcaaagcacttccgctgaattttatcgttcctaattgtctcaggtttgttcttctttttgctttgcctccgctgtgctggctgttgttgcttctgtcgcggacatttatggacggagtgagttttgacttcctaagggagcagatttgccgagtcacgtttgctgccgtgcgtcattcgcgaatcttattgctcgccgtagggggctttcacacgagtggcggcggagcattctttttcctcatggacagcaagtcgtgcgtccatgagctcggagacattcaaactgactgtttgctctttcggttcgacatacccctccatggcttcattaagctcgtcagaatatgttgccttctgctctgactacttttgcagcgtccgttccgttgtgataagttctttttcacctgaatcgttggcacagttcaaatagcaaagcagcatttctttttcggttttctgtttcttcaattttttggttcgctcggtcatgcaataggtgaggttatgcagtttggatatgtggaaaaaaaggcgttttttcctacgcaagcagatttttccattctctgttcttgcccttgagctgctgtaccaatcctgcatagcgttcaagctcaggttcgactgcattgacatgtttgcgcatgtgtgtgtttgcccacgccgaaaggatgttcttagattttgagcctataaaaaggaaaatgaagcgagaggtaaatggcattgttgttgtaaaaataggcaaaatgtatatgtgataactgttgatatggaataaaattggaaaaagagcggtgaaattgattatagcatatgaaacgctcataaaaacacacaatcgaacataaaagattgttgcgaacaatcgtaaaacatgataaaatacaattaaagaacaaataaatcatataaaggagtcgagttgaatgtgaaaggggataataatatgagcagagtgagcgaaatgacaagggagtcctggattatgagtacatttccggaatggggcacctggctgaatgaggaaatcgagaacgaggaagttaagccaggtacagttgccatgtggtggctgggatgtacgggtatgtggttcaagactcccggcggctgcaatcttaccattgacttatggtgcggcaacggaaagcgcactcatggtaatgggaaaatggcggttgggcatcagatggcaaatatgtgcggtgccagagatatgcagcccaatctgagggcggtacccttcgtgattgacccgtttgccatcaagcaggtggacgcggtactggcaactcattaccatcaggatcacatgagcgccgagtatgcggcccatgtaatccagagcggaatgaaaactgtggatgacaatggaaaagagattcctgtgccctttatcggtccgaaaaaatcagttgagctttgggttaagtggggcgttccggaggaccgctgcattacagtccgcccgggcgacaccatcaaagttaaagatattgagatcgtagcactggattccttcgaccgtacctgtctggttactacagactccacgggacctgacagagaagaactgaccggcgtatgcccaatggacatggatgacaaggcggtgaactacctgattaagacgccgggcgggaacatttaccacagcggcgattctcattactccatctactttgcaaagcatggcaaggattacgatgtggatgtggcctttggctcctacggtgagaatccggtggggatggcggataagatgacctcatgtgatattctgagaatggcggaggccttaaggtgcaaggtagttattcccatccattacgatgtgtggaccaactttatggctgatgtgaatgaaatccaggtgctttacgatatgaagaaagaacgtttggattatagattccatccgttcttctgggaagtaggcggcaagtatgtgtatcctacagacaaggataagagagcgtaccatcaccgaagagggtttgaggactgctttgaggctcctcagaacatacctttccgctcctgtctgtaagcctcggtcataagggggaacaatcaatgttaaaagagttcgtgaagtcaaaccattacaaatttgcggaggaggcctctgattgggaagaggccatccgcatgagctgtgaatgcttagaggcagatggaactgtggaggctaattataaggcagacattattgagtgtgtgaagaagtatggtccttatattgtaattatgcccaatgtggcaatgcctcattctcaggaatgtgcaaaaggggtgcacaagacagctattgcttttatgaaactgaaaaaacctgtaagctttgagccgggaaatgcgcagatggacgctagactgttttttacattggcgtcctgcaatccagatcagcatttggcaaatatgacaagactgtcggagctgctgatgaatgaggaggtagtggcggctttactggaggcggaaacaccggaggatttgattaagattcaggagaactatattgagggataaattaagggggataatatggacattttaatgaaaatatggtcgtattttgcagttaacgtattacagcagcctgcattcatgattggtcttatcgtaatgattggttacatattgttgaggaaatcctggtatgatgttctggcaggcgtgattaaggcgatagtgggttacttgattttatctgttggttccggtggtttggtcagcaatttccgtccggtgctggtaggtctgaaagaaagatttaatattggtgctatggtaattgacccttacttcggtcaaaacgcagttacagccggtgtggaggaagtgttcggaaagacgttcggcaatgcgatgattctgctgttgattgcatttattgtaaacatccttctggtgcgcttctctaagtacaccaagctgcgcgctctgtttactacaggtcatgtgcaagtgcagcaggcgtccactgcttactggctcattctgttcgcctgtccgttcctcatcgacaataatgcaagcctcctggttgtaatggctctgattttgggcgcatactgggcggtaggctccaaccttaccattaagccctgtcaggaattgacagatggagcaggcttctgtctggcccatcaacagatgtttggcattgctctgaatacctggttggctgagaaagtttttggaaaaaagaaagatggaaaggatattaaaaagattgacgatttagagcttccaggctttatgtctatttttaatgagaacatggtatgtacctctatcctgatggtaatcttcttcggaacgattctctgcatccttggacgtgattaccttgtggctcagggattcctgaaagaaaatgccagcatgttcttctatgtgatccagacctgtttgtatttttccgtatacctggcaatccttcagttaggtgtaagaaccttcgtaacagagctgactgcatccttccaggggattgccgacaaactgctgccgggttcccttccgggtgttgactgcgcggttatctacggtttcggttctatgaacgcagttcctctgggattccttgcaggctttgcaggacagattatcgctattggcgcgctgatcgcattaaagagtcctgtgcttgttatttgcggattcgtgcctgtattctttgacaatgcaactatcgctgtgtttgccaatgagaagggggggatcaaggctgctctcattcttccatttatttccggtctttgccaggtgttcggttcagctattatcgcaggctgggtggggatggcagcttacggtggatatttaggaatgtgggattgggcggttgtgtggcctgtaatgacagccgtcatgaagtgcttaagctacgcaggcgttgcaattgtagttatcgtacttctggctatcccccagattcagtacaggaaggacaaaaaaggttatttcctgattacagaggattacgaagcatacagagctttgaaagagaacaaatagtaatgtataaatgaattgtcaaagttaaggcgtttataagcaggagaggttaattatggcaaaggaaaatatgagttttatcgtatgctgcgcaaatggtgcgggctcaagtctgatgatgaagatgactatgcagaaaatgctggatacagtggggatcaaaccggggaaggttcatcactgtgcactgtccgaagggaaaaccgcagctagtcagtatgatgtagtattctgcgcacagaattttgcaaacatgtttaaagatgccgagaaaaaaggaaccgttgtaatcggactccgcaacatcatgtcagctcgggagatggaagacaagatgaaagaaaagggccttctctaaaatttaatgaacgaaacgaacataaatacatgacacaagcttctatttgggatataatatacacgtaggtattgagccgtgcaaaaaagttccagaggaaaatcgcgttgtgcttgcacaaaagcacatgttaaattggagtttttgtaggacgaaagccagtgagcccgatgcaatgcagtaaaattgggactcactggggccaatatgagcgaggcaaaacagtattgctccgcaaagtgatatattcctaaatgagaggtgtgacgtatgaaaagagaaagagcttttgtggagagtcgcagaaaccggattgtggagataatggaggagaaaccggaagttcgcgtagatgagctttcgcaactactgggagtgtccctgattacgattagaagagatcttcagtatctggaggaacagaagctccttgttcgtaattatggaggggctgtgtcaaccatggcccctaagaatatgaaggacgaggtgcagctgtaccgcaagcttatcgctaggtatgcggcagactttgtggcagagaatgatacaatattcatcaacaccagcagcaatgcactccagatactggagtatgtggagtgcaataacgtgacggttattaccaataatggcaaggccatagggcgggaatattgtccgggtgttaatgtggtgcttacaggaggcgaattgcgccatccaaaggatgccatggtgggggattttactctgaggaatttgcagcatgtatatgcaaagaaagcgtttgtgggctgctctggcatcagcgcagagttaggaatgaccacagagatattcaatgaggtcagtatcaatgagatgatgatcgcccatgcaaaccagactgtttatgtgctggcagaccacacgaagataggtagtaacagcagctttaccagttgccccatagagaagattcagtatcttataacggatgagaaggcgcccgatgacgccctgaacgccataagagaaaaaggcgttcgggtatatcaggtgcacaaatctgatttttaagacatcatgccactccggattcaaagacggcgattggaaaaaagagacatataatgggaggaaagtgatgaaacgaccatatactcttggattatatgaaaaatccatgccctcgcagcttgggtggaaagaaaagctggaagcggcaaaaggagccggttttgattttgtggagattagcattgacgagacggaggagaagctgggacgtttggacatgtcagaagaggagcgcctggggctggtgagtctgatgaaggaagccgggcttcccatacgcactatgtgtctcagcggacaccgcaagtttccgctgggaagcagcgatcctgctgtccgcagccgcggaatggagattatggagaaagcaatccggctagcagatgacttgggaatccggattatacaactggcgggttatgacgtatactatgacgagtccacagatgagaccaaaagacaatttgctgaaaatctcataaaagcaactgagatggcagcgaaagtaggcatcgtcatggggtttgaaaccatggagacggatttcatgaacacagtgggaaaggccatggagtatgtggagctcgtttcctccatgtatctgggcgtttatcctgatattggaaatattaccaatgcagcaaagacctatggtacagatgtgctggaagaccttcgccttggaaaaggccatctggcagccatgcatctgaaggagaccactcccggcgtattccgcgaagtatccttcggccaaggccatgtggactttaagggagccataaagacggcctgggatctgggggtgagaaaatatgtgacagaattctggtatacagggaatcctcagtggaaaaaggatttggctcaggccaatgagatgatgactagtattctggatgcgcagtgggaataaggatgagtgaattatgaaagttgagaaaaaagtaataggaaatctggctaaatgttattccattgcccctcttcattatcaggggatggattattttcttgtggcggcggagaaggtaggtcgctgtatcctctttgatctggacggcaacgaggtggacacggtatggactgaaccggggggagctatgtccattgtccaggtgccggggacagacgggcagtttctctccacctataagtgctactctccaaacgactctaaggaggccgggattgtatacgtaactccaagaggcaagggagactggctggtaaccacactggtggttcttcctcatgtacacaggtttgatatcctggagagaggaggcgtgcggtatcttattgcctgcacccttaaatcaggccatgagtttaaggatgactggtcaaagcccggtaaagtgtacgctgcggttctgcctgagaatttaaacatttttaatcaggagaatccgctccatatggaagtgattaaggacgggcttactaaaaaccacggatattacagagtcgatttggacgggactcccggtagcgtagtgtccgccgaggacggcgtattcctctttacgcctccggcagagccgggtggacagtggggtgtagaatgccttctggatactcctgccagcgatgcgcttcttgcggacttggacggggacggagagcaggagttagctgtgatagcgcctttccacggcgacagcatcagtatatacaagaaggaggacggccgttaccggaatgcttacgcttatgataagcctgcggaatttgcccactccatttttgggggcatgctctgtggaaagaccagggttgtcatcggacacagaaagggcgcacgagatttgcttgcatttacatataatcaggatacaaaaagctatgaggtccaggttctggacaaggactgcggttccgcgaatgtgtttcggtacacaaaccatggaaaggatgttcttatctcaactaaccgtgagatagatgagatcgccatgtatattttggaaccataaaagcgcagcagcaggaagtaaaaaggagagccgaagatgctggaaaatctgaagaaaattgtctatgaagctaatatggagctgcctaaatacgggctcgtaacctttacctggggaaatgtcagcgccattgaccgggagagtggaatgtttgttattaaacccagcggtgtggattatgataagctgtcccccgaggatatggtggtgatggacttggatggcaaccgtgtggagggaaaactcaatccctcctcggacactgccacccacttggagttgtataaagccctacctctggtgggggggattgttcacacccattcctcatgggccaccagctgggcgcagtcaggaagaggaattccctgttacggaaccacccatgcagattatatgtacggtgagatcccctgtctgcgctgcttgaccagggaggacattgagggggcctatgagaaaaatacggggcttctcatcgcagaatattttaaggataaagagtacatggcagttccagcttgtctctgcaagaatcacgggccctttgcctggggcaaggacgctatggaggccgtacacaatgcggtagtgttggaggaagtggcaaagatggcggcctgctgcgagctgattaatcctaaagtacagcctgcgcctcaggaattgcaggataagcattatctgagaaaacacggagcaagtgcttactatggtcagcaataattggaattgttattgaaatcggggagttgaagatgataaaggaattgatatctgatatagatggtacaatatatgaatatgagagcaataagaagatagtgatagaaaggctgtggggatattggagggatcatctgagcctgtctcgtgaagtgtataaggaggccgggttgattttttggggggacggggtggtataatcatctaaactgctaccaaagcatgctggagtttatggaatcgctgaagttcagaggtattctggtgtatgtgggcagcaatatgactgcctatatccggtacaagaagatggaatcaactgatggatgagagggaaccggttaccgtcctaaaactgatggaaaagaccggactatcgagaggattcttctacaaaaatccaacggtgaggaaagaactggaccgggcattcgagcagcaggccggcatgagcaaccccaaaaagaagattttggatatggctatgaaccatgaaatacaagcactgctccggcagctgagagaggtacagcaggacaatgaaaaattaatgaaggaaaatgaaacgttaaaaaaggcgttggaacggaaaaacagggagctgatctgcagtctttaaatcgaaaacaggatggtacggaccaggcgaatggtaccggttcagcggctatcaaaaggagggaagaaccgcctttggattaggatatcgatcaacaatgtaggaagataaacgaatctatggcacagccaaatcaaaaggctgtgcttttctggtggaaaaaaaggctgttttatgatacactaaaaaccatcaacacacacggatgctttccaagcttcgcttaacgattcaattgaaaaaagtgtgttaacaggtccatcaggaggagggcggcaacgatgtgtaatgaaaacattgcatatgggaaaccataagcgatacgcaacaaaatctgttagaatggtcaagattactggcgcctatgaatttattgagggtgctgccttatgctccaaagtagttaaacttgatatgatccctgttttgttggagcgtgagagcgcctgccttgtagataaatgactggataaaatgacgataggaagaaccatgttcacgtggaccatccgcttgaaagatgcatgaagatgactggattcgagtgtttttataaagttgtatggtggaagggaaaacatgggataatggtggaatagcagtaaatatgctatgaagggatatagcttagtcaacctagtgaatctgatgatggaagattaatcgggagattacgtcttttattttttataaaaaggaacacaatacacagatatgtttgccgttgagggtaaggtttacaaagaggagcggggttagggtacatttaatggacgaggccacatccgcccttgaccaccgcctgaccaccatccagggggcagaccgtatacttgtgccggctggcaatcagattgcggaagagggaaaccatgaacagctgctggagaagaatggaatgtattaccagttatacgcaaccgcaaacagactgaaccaggggattgcatgaaggagaacatttaatatgaaaatagctattgttgcggacagcaacagcggagtaacgcaggatgaggcaaagaagctgggcatatatgtgcttcccatgccttttatgatagatggacagatattttatgagggtattgatttaagccacgaagaattttacagaaggatggaggaaggcgccgacatcaccacatcccagccctcgccaaaagacgtgatggagcagtgggagcagcttttggaggatcatgatcaggtggtgtacattcccatgtccagcggactcagcggttcctgtcagacagcccttatgctggcaaaagagtatgaggggcgcgtccaggtggtgaacaaccagaggatttccgttacacagagacagtctgccctggatgccagggatttggcagagctgggatggagtggtgaacagataaaggaaaagctggaggcaaccaggtttgacagctccatttatattacggtggacactcttaaatatctgaaaaagggaggcaggattacccctgccgcggcagctctgggaaccctgctcaagataaagcctgtgctcaccatccagggagaaaagctggatgcatttgcaaaggccaggaccatgaagcaggccaagaccatcatgctgactgccctggcccatgatctggaggagcgcctggcagaccggaaggcggaacacacctatttgcagattgcacatacatgcagtgagcaggcagcccatgagctggaagaaactgtaagggaattatatcccggcgtccccgtgttcggggctcccctatcccttagtatcggatgccatatcggccctggcgccctggcagttgcctgcaccaggaaattaaaggagctggaataagtgtcggaaaagaaatttgttaagaagctgcgtaccttcggcatgagcatgaaggtacctcttgccgccgtcattataggcgcagccctgattccgctttttctggaggccggcatcatgctgggtacgttccggcagagccagctggatgccaggttcatagagatacagaaccagtgtgtcatactcagcaataagatgacccggtccggctatatgacggctgagaaaaagaacaatgccagtctggacagccagatgcagaccctgtccgatgtatataatggaagaatcgttattgtgggaagcaatttccgggtggtgacagatacctttaatctggccacaggaaagtattatttgtctgaagaggtcatcaaatgtttcaagggtgaaaacagcagccactacaacaaggatatgcagtattttgcccagaccattcccgtgtatgacgctgcggacggaaaagctgtgagcggagtcattgtggtcaccgcatccacggaaaatatcctgtccctgacagacaaggtcatgggaaaatcccatctctttctggtgtgcatggcgcttgtgatcagtgtgttgggcgtggtggcagcccatctgctgctgcgtcctttcaaaaaacttcagatgtcattcgacagggtgacgcagggagatttggacgcggacatcacagaggagacttacagggagaccagacttttgtcccagtccgtccaaaagtccctgggcaagcttaaggccgtggaccagtcacgccaggaattcgtttccaatgtgtcccatgaactgaagacgcctatcacctctatccgtgtgctggctgattcgcttatggggatgaaagacgtgccggtggagctgtatcgggagtttatgacggatatttcggacgagattgaccgggagaaccagattatagaggacctgctgatgctggtcaagatggacaagacagctgaggaccagatgaacatagagcaggtaaatatcaacggagaactggagctgattttaaaacgtctgcgtcccattgccaaacgcggaaatgtggaactgattctggagagcatccgggaagtgacagcggatgtggataaggtaaagatatccctggcaattaccaatctggtggaaaatgccattaaatataaccgggattcgggtatggtccgcgtgaccctggatgcggaccacaaatatttctacatcaaggtggcggataccggtatcgggataccggaggatgcgctggaacacatatttgaacggtttttccgggtggataaggcgcgctccagggaagtgggcggcaccgggctgggactggctatcgcgaaaaatgtcattcagatgcaccacggtatcatagatgtggagagtacggtgggagagggaaccaccttcagtgtgaggatacctcttaactatgtaccgagacaggaggcgaagccatgagcagacataccgggagcagacataccgggagcagacataccgggagcagacataccgggagcagacgtaccgggagcagacatgccatgggaatacatgcggtgagaaggctgattctgcccctgatggcggttgtattcctgttgtcaggctgctgggagggtgaaagccccgcctcaaacccttctgagggcagatatctgatttactatctgaatgcgtccatcaccaagctggttccccaggagtacgagacggaaacaaaggacaagggggagctggtaaatgaactgatggatcagtttctgaatgtaccaaaggatttggactgccagccggggctgacagaccgggtgacctatcaggggagccgccaggaggaacaggtgttgtatctgtacttcgatatgaattacacggctatgaaggcggaacgggagattctctgccgggcagccctcaccaggacccttacgcagattgagggaattgactatatcaatatttactgcggggaccagccactgatggaccggcaggggaatccggtgggaatgttgtcatccactgattttatcatgaacaccagcaatgtgaatgcctacgaaaagacggagctgaccctgtactttgccgatgagacaggcaaccgcctggtgccggagaaacgggaggtagtccacaacatcaatacttccctggaacagctggtagtagagcagctcattgccggaccgggacaggagggacacaatcccactctcccgtcagactgcaagatactgagcctgtcagtgacagataatgtatgctatatcaactttgattccgctttttccaatacaaccctggcagtgaatgagtatatacctatttattccattgtggactctctttcggagatgacgacagtgacaaaggtacagattatgatcaacgggtcccagaatgtgatgttccgggatgtggtgtccctgaataccacctttgagagaagccagaattatattgacggggagagtcaatagggcagggccggcaggagaggcgcaggaaagcactgcaggagaggcgcaggaaagcctgcagaagaaacgcgggaagatacggcaggaaatacgaaaggaaacacaaccgaatatgaagagaccgctagttgtattggcagcaggttacgtacttggagaggtgctggccctgcaggttaacacggcggtggacacaggagttctggcgtggctgtgcgcggctgcggcgggaattctatggcttttggatacagggaggggagtattgcgcttttctgctccaaaggagaagatgcagggcaggagcaaccggaaacgcagggtgcttctgctctttttggcatgtattctggctggcgcgtctttggggatggccagaggggggaaggaaaaggggattctggacagggaggagtctgcggcccggaccatgaacggggctcggatactggtaagaggagaaataaaaaaggctgaacaaaaggaagatacccttacccttattttggaacaggtgacggctgaggcggggaggaggactgcgaagttcaggaggatagtagtgtatgtggagaacggggcgaaaggaaagagtgattccggttttcgggaagcgctgacagctggtttgaaagtacaggtgagagggaagctggctccggtggagggaccgggaaatcccggagaatttgatttcaggacctattaccgcacaaagggaactgcatgcaggctgtatggagaaaacctggaagtggcggggggagaagcgattccatattataagggaataacagaatttcggatgcggtgtgccggtatacttgagaagatatgcatgccggaggatgcggcggtatttaaagccgtgcttctgggagatacgtctgatatgaatccggagatgcgggatatgtaccagcgcaacggaatatcccatcttctggctgtcagcgggcagcatctggctattatcggcggagggctctatctgatgattcgccgggccggagccggttatggccgggctgggatgatatcatctgctcttgttatcagctatggaataatgacaggaagttccggctccgctataagggcagttatcatgatattgtgcctgtggctggcggcggtcaaaggaagaagctacgacaccctgtcggcattgggagctgcagccttaattcttctgtacagacagccttatctgttgtaccacagcggatttgaactgtcctttggggcggttctggcaatcagcggattaggaggctggatgcagtccttccttaaattggaacgggcatgggaaaagacgctccttatcagtttatgcgtacaaatcatactcacccctattgtgctgtatcactattttcagcatcctctttatgttatttttttaaatcttttggttataccccttgtttccatattaatgtattccggtattctggggattgtactgggaggtgtttggattcagggcggagtggcggcagtgggagccggacattatattttaaggttctatgagctgctgtgtaaatttgtggaagggctgcccggttacagcctggtgctggggcgtccatctccgggcgtgttggtgttgtattttggcatatgcgggatgggaacagctgttatgctggtttgcatcaggagacggaccggagccgatttgaaaactcattcccgctgtcttcgggctccgtttcgcggtatagttgactcgaaaccagtgatattaatatgccttttttgcatttatgcacttagttttctggcactggtcccacgtcctgtcaaaggactggaggttgtctgtctggatgtgggacagggggacggtctgctgctcaggacaggcgagaaggtggtgcttatagacggcggcagcagcagtcagaaaaaactggggaatattgttctggagccttatttaaaaagccggggaatatcgtggattgattacgcggtggtaagccatggggacagcgaccatataaatggtcttgtgtacctgttagaggaatcaaaggacatcaggataggaacactggtgctgcctgtgatgggaaagggggaggaggtatatgaaaatctggctgtactggcccggagggaaggggcagatgtggtttatatgaaaaccgcggactgggtggaagcaggggagctgacacttacctgtctgtatgccggtgaagattttggcggaaaggaccgaaacagccactccctggttttgtgcggagattataagggatttcatatgttgtttaccggcgatatgggggaagggcaggagcgcagcctggtcagactggcagaacaggacgaaaccctgcaggatatacatttgaatcatgcgcagatattgaaaacagcccatcatggttcagggacatcttcatcggaagtattcctgaaccggttgaggattcaattagccgttgtttcctatggaaaggaaaatgcctatggacatccgtcgccggagacaatgtcccgtttaaaggaacaggggattgtgattctggagaccggaaggaaaggagccataacacttaaaacagatggtgcatcgctgaaagtccatgtgttccgagaggaaaaatctcatcaggataagctggatgaaatcgctggatgaaatacgcttctgacagccatattataaatatggaagagataatggaatcttggagggagcaggggatgaattatcaaaaaacatctgatgagatattatctcacaaaggtggagcggagaatattaaggaagtgacacactgttttaccagactccggtttacattaagggagccggaaaaagctgaccgcggcaggatagagcgggtagaaggcgtgatagcggttgtggaaagcagcggccagctccaggttgccgtggggacagaggtgggtccggtatatgacatgatgaagaaaatggacggcacagaacgaaaaacgggtaaagagggagagccggtttatcataaggacaggaagggaagatggacacacaccgggagttatgatgcggtccagaagcaagggcctaaaggaggtggcggcatcagtatatcatttttcggggctgccattatgacatttctgctgtgatttgaggatatggatcaggaggcagagaaagcatcatgggaaaggatgtatgtggacagaagcgaacacgacacaggaagccttaagtgcattaaaaaagacagctttcactggtaccgccgtgtcatagagacaaacgggtcaatggtataagctgtcagtagagaaggactgtgtttaaatgcgctctaatatataatccagcagcgcagcgcagccttccgtcacatcggaccaggtggtgtcaaagtcaccggtgtaccatgggtcggccacatcccttccggaaccagtgaattccataagtttaaaaatcttgtggtcaggatcaccgcctgaaatacgctgcatgttgcgaatattccagctatccatgccaatcaggtaatcgaatgatttataatctgcccttgtcatctgttttgcgcggtgcccctcgcagggaatgccggcctgctttaatttggcgcgggttccgtggtgtacaggattaccgatttcttcggtggacgtagcagcagaatctgcccgaattaccccggacaggcctttttcctttagcaggctgcggaagtagtagagggccatggggctgcggcagatgttgccgtggcagacaaataatacttttatcatttttctgtaactccttataagtcctgtatttcttctcaaatgcttgattttacagggttttggggctgttccgaaattctctgtttccagagtattttctcaaatcgtcccatactttctcatatttgtccctgcaaaattggtaaatacgttggtaaaataagcagctttaccaacgggctttttcagccattcgctactcgattcagttcctccttggcatcatcaaaattcacatgggtgtaggtgttcaaggttacgctaatgtctgcatgacccatgatatactgtaaggtcttgggattcattcccgactttgccatattggagcaaaaggtatgtctgcatacatgaggggttactttcggcatctggacacgataaatcttgttgtacttttcaatgatatgttctagtacagcattgcttaaatgtcagtgattaaattactaatggtatcccggcatatgtccacttaaatgggtgtgctgtaagattgtattgttcaataaagcgcaggatgcttgcttccagttcttctattgataggcagcttttccgcttcagcagcttccggttaatgatgccaaaccatatctcaatctggttcatccaggaactgtgtttcggagtatagacaaagcggatccggtgggaagggtcatgcaggaaatccgcccggctttccatacttttaaggatccctgttttcccttttttgcccagttccacgccaagggcacaggcttctgccacaaagcggacaagggcttccgacttatgggtgtttaggccatcgcatataaatgtccatggggcttgcgggtctgtccctgccaatgctttcacggcttccacaaaatcctcttctgtgcgtgtggagtttaaatacggcatttccatacggcccgttgcaacatcaaagaacccgatgaggctggtcgtgccatggcggatatactcaaactccattttggcgcactggccgggtaatgggagcttgtcaggatatttatgttccagcgcctgtaccccggtcatttcatccgtggaaacaatgtgtgcaccttcccggctttgttcctgggcactctggtacaggccgcagatttcgtttactttccgcgcaaaagattccggggcttccgtcttttccgaagaatgaagccagtaacggattttgtggggatgtaaatctacctcatttttaaaaaacggctgacagatttctcagaaatctgttcagcgatcccctgctttttaatttctgccactaacagcgggaggctccactggcttacttcgtacccaaaatcatttgggctgctgcaggcaaggccgatgatccgcatgatctggtccggcgtaaaaacagacggggcaccggggcgttttttatcggacaggactgcccgtatctcatcttcaagcctttccgggtcgtccatttcaatcctccgcaaggctgggagcgccgcgaggaaccgactgcgccaggtggcagcattattataatgaagcccgacctgtggtgcaatattctggttgagttccccctgtgacgcaagcaggacaatgctggctcttttgaccagtcctgacggaagggagcggctttttgaaaaagcagataatatgtttttcatggcatcagataaaaccgggatagtatcaattgttttccttcgcataataacccatccattctttagtgatagaattattatgcaccgactacaataaaaaagcaacgtctattcattattattttggcaatgctgtactagatattaagcagtatgagaatatagtcaagcagcttaaagccaagattcaggagcgccggacgttgttggaggaaaagaaaagtatcccaggaattcaagtatttcgacatcgggagttgacgcagaaaatcgctgctttgaccgaagatatcgaggaattgaaaagcgagaaggccctgctattcaatcagtttaactgtgcggacggtcatggcatgggcgaaatcaaacagtatattgcatctatggaatcttcgctcgaaaggctaaaccagcaggaggaaaaatataccgctgaattggacgcggcactggcgcagtacactgagctgcaacggcaggcggcggatatggatgccatagaactggatgtcgcccgtcacgctattcggcctgataaggaacgggaaacagcccagcggctgcaagccgcttatagcaagaagccaggagcggtgacgcttctaaggtgatttgttggccgtctgtaattcataaaaacgaatccacagtccgctttcgtcccgtagcccctcacccacgaactgattgcggtggagcagaggagccagcgcaggggagtcggtgataaaggtgggcaccgtccggaaaggagtcggccttgcgccatccgtgaaccagccgttgttttccacatagatatggcagtctctgccgtccctgtccgtgcccgtcagcatataccgggccgacatatgccgcacctcgttttgattggtgatctgggtatctaccccgcaaggttctacgatcccattgaaaatgggcccggttaccgtgcctttgaaggggatcatttttacactgccgatttcgctggtcagcatgacggtcccctcgggattagtctccacgtggacctctaaaatgggtgttgatttgtgtttcattgtagcctcctattatcgtttttcccaaaccactccagtaaatagtcaataaacgccttgactgcgtgggcagtatagttccgctggggcagcagggtgtaaaaaagccggttcacttgcagggaagcgatggaaaagaacagtaatctgtttgaggggatggaaaatacgatgcggtcgctgataaaggcggcccccaggccattgtccgcgaatcggtaggccgtaaccagctgggacagcgccatttttacctttggcgcaaatccggcctcctcaaacatgtggatactgcgatcatacagattgtttcccttttgaagcaggatgaactccagttcccgaaattcccccagtggtactctaaggcaggagtcggacatgtgccgccccgcctggacgtcctccgcagacagggcgctccctctcaacgcttcagacagaggggtctcccgaggaacagccagcaggatatggtcaaaaaaggcaggttgatgttcgaaacgctcaatatgctccggcgcacagctgaaggtcaaatccagttcacgccgctccaaacgctttgccaacctggctgaactgtcctccgacacttggagctggatgcctggataccgccgggaaaagccggacagcacctctgctaagaggaaacagttcaggtaatgggttcccccaatgtgcaggcggcccgtgttcagatctttcaggtcctccaattcccggctcaaatcggactccaaatacttcatccgctcgacagcccggatatatgcctcccctgcctgcgtcaacgtcagcgggcggcggctgcggtcgaacaacgcggcccccaggttcttctcctcctgacggacagccatactcagggcgggctgggtcagatagagcttttccgccgccttggtaaagctgccgtcctgatagacctgatagatatactgcatattttgttccatatataagccgcccttatgtatctataaaaatcataaaattgattatacacctgctttgtgctattgtaaagatagcataaagaatttcttttgatccaataaaattcagaaaaggagaacaaacatgaacatcaacgcactgctgatggatcagcgtgacaatgtggtaacctgcgtggcctcggtgcccaaggggagccaaatcgtctatcaaaagggcacagaggtatgtacgctcactgctgaggatgacatcccctactgccacaaggccgctctggaggacctgccccagggggcggaggtacgcaagtacggcgagatgatcggacagaccagcgtatctatcgccaaaggacactgggttagccacgagaacattttcagtgtaccgcgggactatgacagtgagttcattcactgagaggaggcaacgatgatgcaattttggggctataaacgtaaagaaggccgtgctggcatccgcaaccacgtcctgatccttcccacctgtgcctgcggaagcgagagctgccgggtggtagccagccaggtccggggtgcggtaaacatcgtattcaacaccggctgctccgatgtagcggccaacaccgagatgtctcagaaggttctcacggggtttgcctgcaatcccaacgtctacggagtggtcatcattggtctggggtgcgaaactgtcccccaccaaaaacttcgggagaagattcaaagtatgaccagcaagccggtggtgtccttcggcatccaggacgagggcggcacgctgaaaaccattgagaaagctgtccgggccgctcgggacatggctgcggaggcagccatgcagccaaaggagttgtgcgacatatctgagctgctgctgggaatcgagtgcggcggctccgacgccacctctggcatcgccagtaacccagccgtaggcgaactcagcgacctgctggtggacatgggcgcctccaccatcatgagcgagtccatcgagtggatcggcggagagcatgtcgtggccaagcgggccgctactccggagatacataaccagatcatccagatctgcaaggactatgaggagcacctgaaagccgccggacaggactgccgggccggccagcccaccccgggcaacaaggcggggggcctgtccaccctggacgagaagagccttggctgtatccgcaagggcggcacccgccccatcgtggaggtgctggagcaggcccagcggcccaccaagcacggggccatcgtcatggacaccgcaggctacgatatctcctctcttacctccatggtagcgggcggctgcaacgccatcatattcaccaccggacgggggacccccacaggcaacgccattgtccccgtgctgaaggtcaccgctaacgcccacacctaccagtgcatggaggacaacatggatgtggatctgagcgctatcatcaccggcgaaaagacctatcagaagatgggggcggaactggttcaaattattggagatgtctgtaacggcaagatgaccaaagcagaggcgttcggcttctctgacattgcggtggaccacgtctgccggttcgtataagcgacctcaaaatagaaaggagatagagacatgacctcattaacgatttgtttaatcatctgcgtgctgactatgatcagctatgtgtggggcaagctccctatgggtctgacagccttgaccagcatggcggcctttatcctcaccggctgcctggaccccaaaaccgccctgggctactttggaaattccaacggtgtcatgatcgtggccatgttcgtggtggctgccggctttacccggactcagttcgtaaagaaagccgccgccagcgtgaacaagatcgcccacggctccctgacgatggtcatgctgggctacgttctggttaccgccctgctggctcagttcatccagagttctgtcatcgtgttcggcatcatggctcccatgatgattgccacctgcgacgagttgaaaatcagcccgtccaagaccctgttccctctgtccatcgtcagcatctccaccatctctgccctgcccctgggcagcggcgctactcaggccgccgaactcaacggctatctggaggccaacgcctacaccgattttgttgtagccataaccgaccccatgaaagcccgtctgcccatgctcattgcagtgatgatctactgtattttctttgctaccaagtttgcccctgacgccccggtggtccagacctccgagatgaagacccgccgggacgataaagcggccctgcctgctttccaggagcgtgcgggttacatcatctttattctgaccactctggccctgattttccagcgtcagatcaaagtcgacacctgggttatctgtctcacaggcgccgtggctatggtcctgtttggcgtcctgacggaaaaggaggccatcggctccatcaactggtccatggcgttcctgatcgttggttcctttgctatgggtggggctctcaccgagaccggcgcgggagaagtggtcggcggcgttctggccgacttcgccaacagcatcaacaacccctacatcatcggctttatcttcttcatcgtgcctttcctgcttacccaggtgatgatgaaccgcacggttatgattatcttcatccccatcgccatcctggcctgtaaggctatgggcgccaatcctattggcatcattatcctggtgcagtccgcctgcctcagctctttcatgacccccatggctacccctgcggttcccatgtgtatggccagcggcggctatgatttgaaatctctcatcaagcagtccatcattcccgccaccattctctgtgttgtctccgcaggctggattatgaccgtattccccatgttctgagaatatgcttcacctccccactccaaacgggggtgaagcatcgaaaggaggtatgctttatgttagaaatcaagcagtttcccgctgatatgagcgctctggaggtggaccataccgatgccaagcgttgtttgatctctgggctgtttgaggaaaaagtggaagtttcgggtcagaagcggcgcttctacacctatatcgtgccggggttgtgcagcaatcagccttgcctggtagtagctccaccggaggatgtgtctgttctggatttcctggaaaacggcttttggataaggtttgctgagaagaaccagatcttcctccacatcctggagccagagaacggaaaataccgcctggacggcaccgattccgcctatatgaacaaggtctacgtggagattcagtcccggcggttctacgtcaccatgcaggacaatatctacgctgtcgggatcggcggcggtgcggcggtggcccagcaggccgccatggagatggcctccgagtggtcgggccttgccaccttcggtgagatgacccccgaggtactccaaagcgccgggcgggtccacgccggggagaacaccgggaagaccgaactggtggtcagcggaaccaaggcacagcttcccgtctggatgtgctggggggagaccaccggagataaccaggcggtacgggactactggaagggccagaacgacgcagacaacgaggtattttccaaccgttgggcagatgaaatttacttccccagccgggtgtgcaaaaagagtcaggtcaacgaggagaagatcgcccaggtccgggtgaccaacggctggtccggcgatttgaacgaggaatttttcaccgccatctgggacttcatcagccttgcccgccgtcaccgcagcttttctaaaaaagccctgcgttggtatgaggaccccgccgcctacggtgctcagctccacaccctggaggtggacggctttacccgccgctggtatgagtatgtgcccgagagcgtccggaacagtgccgcgcccgtccccctggtggtgtgtatgcacggcaggggcggcagcgcggagagctttatcgacctgtccggtatgaaccgggtggcggaggagcgggactttattgtactgttccccgaggccagcgtctatcagcagcaccccggcgggctgaggaatgtcctgctgtggaacggaagctatcagggtaagcccatcgacgatgtgcccttcattctcagcatgatcgaggatgtgaagagccggtacgccattgattcgggccgggtgtacgcctgcggccagtccagcggcggcatgatgacctccgccctggcgatccgtgccccggaggtgttcgccgccgtggccccctggtcggccatccgcaacccagactttgacgcccccccactggaaaaaatcgacccgatggtgccctatctgttcctctttggagagaatgattggctgtgtgtggaccgggaaaagggcgagctggagtatcatgtagcccctgacattgctgctttcctgcgcaatctgatgaagatctatcagctggatgagacgccccaccggtatgcctgcggcgagatcagctactatgtctatctgaacgccaagcgggttcctctgctcgttgtaggtactgtgaaagaaatgtcccacgccaactacccccgggaaagctggaacacttacgacgaatttttgtccaaattctccagacgcgccgacggaacgctggtgtatatgggcgaggaagtttaaccgttactaaccagaaaagtcctttaccgcagcgcaggccagggcagcaaagactgcaatggcctgcgcttatatgtaatcaggaggtaaataatcatggaatacaaatatcccaacctgtgcaagcccatcaccctgggccgcaccaccttccgcaaccgcatgttctctgcgcccatgggcggcaccgatattaccaccgacggctgtatcggccccaaatccaccgctttctacgaattacgcgccaagggcggcgcggcggcggttaccgtctccgagctgatggttcatccctccaccgacggctcccacgcctaccacctggacgagtccatcctcaattccctggcctgcgccacctacaccgccgacgccatccgccgccacggggccatccccagcatcgagctgtcccactccggcatgtactcgggcacctacatgaccgacaagaacaagcagcacggtatgacccagtgggggccttccgcctgcatccgccccgatggggttcaagtaggggaactcacggtggagatgatcgatgacattgtggctgcctatgcccatgtggctggcttggtcaaaagggcaggctttgagctgctgatggtccacggtggccacggctggctcatcaaccagttcctgtcccccatgttcaacaagcgcaccgacgagtacggcggttctctggaaaaccgctgccgtttcgccattcgggtgctgaaagccatccgggaggcgatagggcccttcttccccatcgaattccggctgtccggagcggagttcgtggaggagggctatgacctggaggagggcatccgcattgcccagcagattgagccctacatcgacctcctccacgtcaccgccggcacctatcagcgcacctttggcatcacccacccctccatgtttaccgaccacggacggaatgtctatctggcggcggaaatcaagaagcacgtcaaagtgcccgtggccaccatcggcgggctgaacgacccggcccagatggaggagatcatcgcctccggcaaggccgatgtggtctacatggcccgggccctgctggccgaccccttcctgcccaacaagattatggcaaatcaggatgaggatattgtccgctgcctgaggtgcttcacctgtatggcggagcgggctgccacctccacccgccgctgtaccgtcaatcccctgattggccgggagtgtgaaggcagcgaggtcgcccctgccccggtgaagaagaatgtcctggtggtgggcggaggccccggcgggctgtacgccgcctggactgcggcccggagaggacataaggtcgtcctgtgtgagaaagaaaacgagctgggcggcattctcaagagcgagcaggccctgcctttcaagtacgagatgtaccagctggcagggacctacgccaaattctgccgggacaccggagtggagatccgtctgaacacccctgttgaccgggcctatgtggatgaaatggccccggacgccgtgattgtcgccgcaggctccagccccctggtgccgccgattcccggcctggacggggataacgtagtgatcgtcaacaactactacaaggagaaggacaaggtaggtgacgatgcggtcgtgttcggcggcggtctggccggctgcgagtgtgccatccacctgggccaggagggcaagaaagtccacctggtggagatgcgggacatgctggcccccgacgccaatgtccgccacctccccctgctgttgaaggagatcgacaagtatgtcaccgttcatactgggtacaagggactgcgggtcacagaggagggtatcgtctgtgaggacaaagagggcaaggaggtcctggtccccggcaaatccgtgatctgcgcccttggccagcgatcccgtaccgatgtggtggaggcgctgaacggctccgctccctttgtccgggtcatcggcgacgccgcccgggtttctaccatcaccaacgccgtctactggggttaccacgccgcgttggacatttaaacagatactaagtttgccgctgttcttccgaagaggacggcggcaaaccataatttatcattttaatcataaataagggggaataccatgcctgttggagttattgtgaactgtttatccgtgctaatagggggatttgtaggcgcagcgcttacccgaacactctcggataaactaaagtcagacctgtcaatattgtttgggttttgctccattgccattggtatcaattccatcattaaggcacaggccatgaccgcggttgtcctggcaattctggggggatttatcattggacatatcttgaacttggacacagcggcaatccattttttcagatggctggttgaaacactgcgtcttggcagagagaatatcgacatggatatgtatatcaccgtagttgcattgttttgctgttccgggttcggctggtacagcacgttgatagaagggattgccggtgataccagcctattgttctccaaatcggttctagacttttttacagcccttgtatttgcggcggcgctggggagagcggtctgtgtgattgccggcccgcagattctggttctgctggttatctttggtgttggccgcatggcgggtgcgtggatcacactggggatgtttgctgatctgtccgcctgcggcggcattttgacgttggccgccggtatgcgcgtagccaaaatcaaaagcgtgcctcttgtcaacttaattccgtctctgattttagttatgcctctttcagcactgtggacaacattgatgggatagggttattcagataaaaagcgactaaattaaagtggacaaaagtcgagtgtacggtcaaagataatagtaaatgtcaagtatagagttatattagtctgcgatattcttcttctgctccacttcatctttacgttcacacttgactagggatagaatcagcaattcataatatttttgtaagggtgaaaatatccttgacaaatctcttctcagaagcgaatccttgaaacctacgcacgggaacacggcattatgaattaccgttttttcgtggacgacggttggagcggggcgaattttgaaagaccgagttttaaggaaatgatagagggcgtggaaaatggcgagataaagaccattatcacaaaagaactctcccgtttaggcaggaactatctgcaagtcggcatgtatacggaaatggtgttcccaagaaagggagtgcgttatatcgctatcaatgacggcgttgacagcgaacagggcgacaacgatttaacgccgttgaaaaatctttttaatgaatggctggtgagagatacgagcaagaaaatcagagcggtaaaacgctcaaagggcataagcggaaagcccgtcacaagcaagcctgtatatggctacctcatggacgaggacgaaagaagcccggtttatgaagcacctaatcgagcagaacgaggacgggggcaaacgccggaacgccgccaagaagaaagagctggaagcggcagaaaaacggattgcggaactctccgctatcttcaagcggctgtatgaggacagcgtgaccgggtgcatatcggacgagcgtttcacggagttgtcggcagaaagggcaggaatgtaaacacatatcgtgacagccggatgccgctgtacatcagtgccagcatcgctgcaagcacggcgatgtctgccaccgtcgggagaatgcggcttgctgtatatcttcccttaaacagctttttatgccacactgcgttcagcccatgatgaagcaggaacagcacaaacaaggcggctcccacccattcgcgggcagcttctccccacaggtggtagcccatgaggaacagcattgctattgtcatgaaaaggtcaacgaggattttcagatgcttccgtttcatatcacagcctctggttaccggtagaccacacatggggcttgctggcttctgacgccgtattctgtgccatgacgccgaccagtacatgggggacatacagttcttccagaaatgccatttcctccccagaaagactcagctctgctgcttttgcagccccctcaatgtgatgtaacttggtggcacccacaaccggagaagttaccttctgcatcagccatgccagagcgatctccgtcatgctgacacccttggaatctgccagttctgccactcttgcaatgatcctgctgtccgccccggcagttgcatcatatttcagccctgcataactgtcctcagtcagccgcttggaggtctcgccggggtgcttgctgagacgaccaccagcaagggcgctgtacggggtcatggcaatgttgtcctcccggcaaagctgtgccatttcccgttcttcttcccggaaaatcaggttgtaatgtccctgcacggaaacaaattttgctaagccttctttttcagccagcgcattggctttcgccagctgccatgcaaagcagttggaaatgccaatataccgagtcttgccctgttttaccacatggttcagcccgtccaatatgtcttgcagcggggtctggtaatcccacatatgatagatatagaggtcaacatagtccataccgaggttttgcaggctcttgtccatcatccgctgaatgtgctgctgaccggagataccgttttcaatgtctgctgccgtccggggcaggaacttggtggcaatgactatatcttcccgtctggcaaaatcccggatggctctgcccaaatactgctcgctggttccgctctgataagcgatagcggtatcaaagaagttgacacccagatccagcccccgtttgataatctcacgggagtgttcctcgtcaatcgtccagctgtgctgaccgtttgccgcatccccaaagcccatgcatcccatgcagattttggaaaccgtcaggtcgctgttgcccaatgttgtatatttcataactgcacctccttattgtaaaccgttcgtttccaaccatgtggcaatatcatcattcagcgtggaaccgccggagtagtgaacggacagcgcttcacccatagacgcatccgctgccagccatctgctcctacggcaggcatattcccattctgtttccgtgggcagacggttgacatttgctgtgcgatcccagctgacacgcggcccctcaatggtatacacagggggcagaccttccagctgactgcggcaatagcggacggcatccagccacgaaacgctctccacaggcagatcatccctgatgaaattgctggggttctcacccatcacggcttcgtactctgcctgcatgacctcatagcggcttatataaaaatcactgactgttacctctcgctgagccagaccgatttctgtcagccactgtacaagctggtcactactgcgaacagccaaaccatcggtcacagctgcatcaggctccagtgtggcaatggccgcaggcgtaccggacagaccactgccgccgctggtgcagaaaggagcaatggtcttgccgctaaagtccacagcatcaaagaaggtgtacagaatccgaggcatatcgccccaccagatggggtaacccacatagatcaccgaatagccatccggatccggcagttctcctgcaatggcaggacgggcgctctggtcgttctgctcggctgttgctctggtggaatggtcgttgtagtttaagtcctcgtcggtataggggtgctccgggacaatttcataaagatcggcaccggtcaaggctgccagctcctctgcggcagatcgggtgattccggtagcggagaaatagacaaccagcgccttttcttcggcagcttccatttcggacgtttcctctacattgttgtttccttccacaggagatgcagtttcttcctccgtgggtgcggaggtgtccatggatgcagaagagctttctgtctgtgcggagctttcagctccgacggattgaatttcatttgtggttcctgcgcaggcagccatacagaaaaacagcgcagcaatcagaaccatagagaataatttcttcataactgtacctggagactcatgtcttcggacatgagaggaatggtgcccctcagcgtctcttacagagcctctctttcctttttttattgaatatccagaacatgcgtttgctttttctttttcgctatgctataaagcatcagtcggtgaaaagtaatggttacccattcatccggctcaccttttcccggcacgaatacgatctggtttggaaccgggattactcgctgcgggacgggatgtttcgcttaaacacactgtctggccgcttgaaggttcccttgaatccaaaggcatggagcattggctttcctgcgaaggccggtttggcacggccaagctgctttgtaaaaacaggaaatggtttccgcatgttccggttgccctggaaaaagcgcgttctattccggccgtccggtcaagcagaaacgggcgaacatgctggcccttcggaaaggtcttcaggtccgtggaaccaaatccgctaaacggaagcttaaaaagcttcgggagagagaatcccgttatgtaactgcggtaaaccatgcagttaccaaggcacttgtctcccactatggagccggaacgctttacgtgctggaggatctgaccggtgtaaggaaagccacagagcaggtccgcaccaaacagcgctatgtgacggtcagctggtgctgctatgaattccggaagatgctggaatacaaagcactcatgaccggttaccgtgtgattgccgtggctccggcctatacaagccaggactgcccgatatgtggaaatcgtgccaaggaaaaccgaaaccggaagcggcatgaattccaatgccggaagtgcggataccaaagtaatgatgaccgaatcggcgatgaatctgtaccttgccgctccgaagagcatcccagcgtaacaattcgattccgttggtatcgaaaacgaatcctcctctggttagcagaggtctgttaggtaaagccgaagcagaagggctgcagtcaatcagcctatagtagccaatgtttgaggtaggagacagaggaatactctgtcgcttgtactacggtagttgagttacaagcccgtgtcttgagacatgggtaattgacagattattccttcctaatatatgatggtcacaccttattttaatttcccataggtttccgcatccacagcttccagccatttgttggagccattctcgccggggacttcgatagccagatgggaaaaccaactgtcaggggcagcaccgtgccagtgcttcacgcccacaggaatgttgatgcagtcaccggggttcatttcaatggcgtccttgccccattcctgatagtaaccacgacctgccacgcaaatcagaatctgaccgccgcccttcgcagcgttatgaatatgccagttgttgcggcagcccggttcaaaggtcacattgaacacaccaacctgactggtggagacaggggaaaggtagctctgtcccacaaaatactgtgcataggcatcattaggggcaccgattgggaaaaccatgccgttttcatgggcagacttggcatccgtgaccgcatcctctgtccagacctcctttgctatgttgaacactgcccagcctttgggccagcctgcgtagaaggccacatgggtaatgactgcagcgatctctgcctttgtcacaccggctttctttgcgttttccagatggtagcgcagagaagaatccgttacgccagaggacatcaatgctacaaccgtgatgatgcagcgggttttgtggtcaatatcctgattgctccagttctcgccaaagagaatatcatcgttatagtgggcaaattccggggcaaagctgcccaaagcgtttctgcccgcagtctgtacgactttttccataatcaaatttcctttcgttatattttcttaatccagcattccaattctttttcggttacattagagaggaacactttgccctctgtgatcgtggtgctttcatccacagaggtacgcagatagttcacggcatgaccgaaaccgcttccgccggatgttgcgaacagaacgattttcttgccggaaaaatcatggctttccagaaagctgtttacgatggtaggagcgatataccaccagatggggaagccaaggaaaaccgtgtcgtatcggctcacatccagatcggtttctgccagagccggacgagagccgcggtcattcatttctatactgctgcgagaacgtttatccatccagttcaggtctgcggatgtatagggaattgcaggggtaatttcatgcagatcggcatttgctgcctgtgccagcttacctgcaacagaagccgttgttccgctggcactaaaataagctacaagtgttttggacattttacttttcctccttttttgacttgaaggacaggcatttgcccagcacctcgccggtagccagatattcatagctggggaactggaacagcacgggcttcagcttgttgtagtccggcttaccagtttcggtcatacaacctttctccacataggttccgtcgatggtgcaaatgaagctctcaaaaccgtccgtctcataaatgtacaccacactgcacaccatggtcaggggagacttttcgatgatgggagacttgccatcctgtgtcagccacgcaaacagctgagacttatcctccttgcttccgctgagagagcctgccagatctgcctccggcagcatatccggctgcaccagattgatggtcagctttttggtttccttgataatactgttgataaagtgtggttttgccagactgaccagaaccttgtcatggccgatgatgcctacatgggcaaccagtgtccatgtggggtttgccccattcattgcaccgatcacagtgaccggaagggggtacaatgccagcagagagccaatgtttttcttcatagattattcctcctgttgctttactttttgaagtttgtgccgcagatagtccagctgccgcagctgattttcccgtagatgaatttcctccagtgcagccttacgccgtgcattcagcatttccaaacgctgctctacggtgtggctgccatccagaagcagctgcatataggtttccacttcctgactttcaaagcctacctcgtgcagcgtcataatcatgctcatgcgctccagatcttcgtcgtcatactgccagactcccatgattttcttcacgctggagcaaagcccgaagcgttcatattcttgcagcgtttccagtgggatctgatagcgtctgcttgcttcctcaatcgtcatttccttctccttgtgcaaaaaaatgtaggtatcccaattggaatacctacattgtatcgtctgttattaaaaatgtcgaatacctatattacattctgagaaatgctcaaatcgtatttctcagccacttgataaagcaatcggttgcctgtgcctgaaattgattcttcttccatacaacgaccgctccggtttctaccgcagaagcaaatggaacaaatatcagctcctcataaaaactgcccagatcaaagcacagcgccaccccggcattttgccgcaccagagcggcggcgttcaggattaagttataggttgcagcaatctcaagccggtcatatgtttcaccaaaccatgccgacagttcgtgccggacaacctctctccggggaatgagcagcggtaccctcagcaaatcttccggaaaaaccgacggtttctgtccgaggggagagtccttccgcaccagaacgccccatttttccttccatggcatacgaatgaaatcgtacttgccaatatccaccggctccatcaaaagtcccatgtccagaagtccggcttccatccgctccttgatgtcgtctgctgtggcgctgtagaggctaaactgtaccagcggatatttctgacggaaagcggtcatctgctcggccagcagggtcatattccgggtttcaccgcagccaatggagatctcgccggaaatatcctgctccctgtttgtgagctcctgcatggttcgatccgacagggcaaccagttcctgtgcccgtcttttcaggagcatcccatcttctgtcagggaaatattatattttccacgccgaaacaacgtcacgcccaattcctgctccaactgctgcaactgccgggagagcgttggctgggtcacatgaagcagctgtgcggcttttgtaatgttttcttctctggccaccatgagaaaatagcgtaatacacgcagctccatggagcaatcaccgcctttcctgcttttcattatattaatccattctattcatttcaagcataactgccatcaagttatacagcttttgtttttttgatgctgcatttcctgcagggtagaaagaaagccataagctaaactcaattttcagaacagcagttccccaccatgaatagtcaaggaacagggacaattctctatacggctgaaatttaccgtttggggacaggaacttctgttccatgtttttgaaaaaatagaccaaaaaagggcaggtcattttcttgtgacctgctaaagtctactataagttcatgctttgaacaagtatttcttttatattcttctatttacagcctgttcactgccttgtataatggaagcaggcagttcctgctgctgggtagcttccatctccgaaagggggtggtataacatgagtacatatgagacactttctttgatgatagcgtttggggtacttgttgttatgattacaggtacaaaaaaatagtcacccgcctcccaagctcagtgactatttttaattaagctattaacttggaagccactcactggagtgaactgccttttttgtacctttattataatccaattctaccacatatgtcaatcatggattttctttatacttcccaaaggatgtctaaaggtatatctggaatttccaaaatgcttcagtgcgtattccaggggcaaacgattctgacgaaaaaaatagcagtcagacatgctccagtgccagtaattccgaagctgccttcgcatcctttactcttattagattatcccatgcatcttccttcccaagcaaaatcatcccaccatgccacacgagacaatcattagatgatgaatcagaatattcggagtcaaccttgtccaggttctatattcgcagtcatcacaataccttttttccctttttgctttgggcatagggcagtgttccaacgattatcacattgaggatagtaattcccatttttagctctttttgcaaatacatctttcccgcccaaaacatggagaaaaatcgggttgccagatttgtgccaatatattgctgactgattctggctccttgatccaaatcgtattccgcggcagaaagcgcgtctgagaatacttcactttcagaatatggtatggccgctttattaagaagggctctaagttttctgttctcagcctgcaaatctctgactaacttcccgatggaatcaaaatcataagcccctatattcatgcaactccctctttttatatctgcggttccaactaaccgcccttaatgtcaaccctgcctttttagaccctccccgtctttaccgcccggaacaaccagccgcttcacatccgtatcaaattcatcccctgtcaccaatgaaaccgtatatctttcatcgaataaatcaatcaggttttccacgtccctgaaggtgtgcagataaatttgtccgccgcgtatatcaaataccccctgccagcgggggactgtattcaccctctgtatcagttcttccgctgtcttttccaccacatggtaatgcttaatccgcatcatcttgcgggaatatttggtctggttccgctcaatataggccgttaatttttcacagttgatcaccagacggatatctgaaatatcagacaccgcctttttggccgatgccttgatgaagtcattgaacccgaaatgtctctgcatcaggccgatatctttggtgacgattgtgtcccctatgatgagcaggtctacttttcttgtgattacaaagagctgttccggcatttccacaaaacaatcggtctgttccgtatctaatatccgggcaaaaaagtgctggtttttcttattggggattgtggcgggaagtatatactggtaggcccagatactgtgaaggccccttctgaagcggaagagtatggcatcggccttgtccctgtcgtccatgcagaaaggccccatctgttcttccggggtatttaaaagctcaaacggtttgtaatcgtcatcctgctttatgatataaaaaatattctgattgccccccgcttgttcagccattgcatattctgcctcatcatcaagatacagttccctgatactcttgacgatggagttttggactttatgcttaaaatcgttttccctgccggtagggccctcataaaaggtgaaatgcttaataggcggattcctggttttcatcataatgaacatatcaaatccaaattcatcatccgcaaacagttccgccaatgaatttacaattatttcctttgacgttttttcggcaacatctttcttaccatgttctctatgttctctttggttttccattgtatttttctccgctatttcagtttttattgtacatcaggcagacatcatccgatatatacttccatttcactattttttcctctgcaatgcctgttttgcacactgcaatcatggttttatccttacagccgtctatgacaggattgatgaagtggaatttgtatatcctgtaacccaacagggtcagtatagggttctgataatacagatgggtggtccacatcaagcggatgaccagccctaaaataccggtaaaaatgatgaacccctttaaggtctccacgtcatccagcaaaagaggcagcacaaaagtcatgaaaaacgtgattccggaatccgttatctcttcttcaatcacgactttttcgcctgcatccacaaatccggacatctgcatgctcttaaactggcacatggcggttatgctgtaaagggagcatgccaatgaagcgatagtgacggcaaacggacccaggtacgggtggttccatatccggtttatgacactgaattccccctgcatcaaagaacggatgaaatggcatatgccggatatcatcctgtagtcagaatattttatgaaaattaaaataaacagcggaaggaaggactgaatgacaagcttccttttcagctttaagttttgttcccccatagtttccttttgcctcccgtttttggcatgaataaaataccttatatatatatgttccatgactacagtctactataaatccgggagatgaacaaggaaactttgaaccttaagccgcacttttcaaacatgctctagtgacaaatcaccttgccctgtgttatactgaaattgaaaaaacatcagccaattgacgggatatggaaggacgacctttacatgcagacattgaaccaggacataaaagaccgtacatttaagcctgtataccttctgttcggtgaagaggccttcttaaagaaaagttataagagccgcctgagagaagcccttaccggcggggataccatgaattataattattttgaaggaaaagggatgaatgtgaacgaaatcatcggtcttgcggacaccatgcccttttttgcggagaagcgccttgtactgatggaggacagcggattctttaaaggcggggcaggagcggacgagctgactgagtatatgggaggaatccctgaatccacctgtcttatatttgtggaatcggaagtggacaagaggagcagactatataaggcagtgaagaaatacggctatgctgcggaactgagtcatcaggaaccggcccagcttgccagatgggcggcaggcatcctgtctaagaacggcaggaagattaccggccgcaccatggaattctttttgagcaaggcaggggatgacatggagaacatcagctcggagctggaaaagcttataagctatactctcggccgtgaggtaatcacagacgaggacgtggaaaccatctgtaccacccaggtaaccaataagatatttgacatgataacagccattgcagcacggcagacccgcaaggccatggacctctatgaggatcttctgacgctgaaggaaccgcccatgcgcatcctttttcttatagcaaggcagtttaatcaaatccttcaggtcaaggacctgatgggaaaggggatggataaaagtaccatagcgtccaggctcaagcttcagccctttgtggtgggaaaaatcatgctgcaggccaagacatttaccagggaacagatcctgtcgtatgtgaatctctgtgtggatgccgaggaaggtgttaagaccggaaagctgcaggaccggctggcagtggaactgctcatagcaaacaaatatgaataaaaataagaggaatgaaggcgatggatatgatggagacaattgaactggaagatttaggggatcaggccaggcaggtgctggaggagcttatggaggtggcccgcctgaagccgggacagattctggtggtaggctgttcgtccagcgagatagacagctttaagattgggtcccactcaagcgcggagatagggatggctgtgtatacggctctttaccaggaactaaagccaaagggaatttatctggctgcccagtgctgcgaacatttaaaccgtgccctgattctggaggcagaggcagctcaggcttacggctatgaaccggtgaatgtggttccccagctaaaggccggaggttcctttgccacggctgcgtatgctaccctggaacatcctgtggcagtggagcacatcagtgcccatgcgggaattgatataggcgataccctcattggcatgcacatgaaggacgtggcagtcccggtgcggattaagacaaaagagataggaagcgcccatgtggtatgcgccaggaccagacctaagtttatcggcggtatcagggcccgttacgacgaggaaaatatgtaaggatcgcagccggttactgacatagaatatgaaaatgggatatgaggagggtaagcgctcaataaaataatggctatctttttgtaaagcatccagctatagttaaagcaaactgttccaacttcaactttttgatttgatccggcatctctgctgtatcatttctgaccagggcatcagatcttctataccttcgggctcatctttgtagtccggcatatagagcagtacggtcttcagatacgcgtagatgttcagattgttaagttttgcagtctccgccaggctgtagatgatggaactggcctgagcaccctttacggtattggtgcgtctatgttcatgtctgtggcagttggcaatcaaaaagtgcggtatctttccatcaaggatatcgacattatttctcagatggtctatctggtatatcgtaacgaccttgccatgactgcccccatggagtatcttgtctctttgctgtatcacccttagtttcgtcacatactatggggctgtgaaaaaagtcccataaaaaaagaacgctttcaggtacaggacctggaggcgttcttctttttgtggtaaaattaagctactatgaataatattaccgagaagtattatagcctaaaacagggaagattgccactgtttctttcagattgtctggatatctgtgatccggtattagcatttgacagaatcatggaggagattggaatagaaaaatatcttaggccagagcctttacacaggataggccggcctggatataatcgggtcaacatgctaaagacagtcttattcggctttatggacacaggatacgcttcccttcgggaattggaagaccgatgcaaagttaacatccgttacatgtacctgatggatcatgaaactcccagctaccgcgccttcagttattttatttttcatgaacttctgcccgccttgtaatttcttcatatcgttgcacaattcccatcagcctgctataatttatacaatatgttatattttttcgcaaattttatttgagagcggtatctgtgaccaaaaccggaataagggattttcatggatacgatgccctcacgtcagaccgggtgtataaaaaggccattccccatgaacaggcagccaatatgattctaaacggcgaatgcggctgcttttcctccaggctgctggactgctttaagaatgtggagcagcagcttgctgacctgtgtaaatggtaccggacggcaatgtaccggctccagccaagctgtcccgccacggtagtgtgccggggatgtggggagtattgggtgggtttttgagaggagggggggggggtgatttgacggccctgtttctcctgaagcagagggcccgggataatgccgcggatttggcggaggctctgagggccttgccggaacatcagaattcatggatttatgtggtggacatggaaagccatgaactgctgctcatcaacaacaagacatataagattacgccggattcaaagatgggcatgagctgccatgatatcacctgctataagacggcggaagaaaatggctgaaataaataaaacaggtgagcagaacgtggaaattggaatatgctgacagtagagactgttgcgaagaaggagttccatatgaaacgttgtgtaccgttagagccggaggcagaggaggtctgtcaggcaaattccaaaccgccccttatatttgagctgccccctgccgagggaaggatggttctggaaaaggcccaggacgcgcctgtgtacaaatatccggcccgtgtcagcaaagtgcgggtcaataccggaagatggggcgctattccggtatggctggtggatccgggtgtttcctgccagccagccaatgtcatcttttatatccacggcgcaggctgggtgttcggaagcttccacacacatgaaaaactggtaaaggagctggctgccagaaccggatgtgttttgatatttccggagtactcccgttcgcctgaggcgcgctgtcccacagccattgagcagtgctacagcgtcatgtgtatggctccggtccttgtgaaaaccatgggatatgccatgaatcccggaaccttcaccgtggccggggacagcgtgggaggcaacatggccacggtcatgaccctcatgtcaaaattcaggaagggacccttcatccagaaacagctgctgtattatccggtcaccaatgcctgtttcgatacctgttcctataatgaatttgcggcgggatactacctgtaccgggcgggtatgcagtggttctggaaccagtatgccccctgtcggaaggacaggggacagattacggtctcgcctcttcgggcgtccgcggaacagctgagggggctgccggctgccatgatactcaacggcgaggcggatgtcctcagggacgagggcgaggcatatgccaggaagctgcgggaggctggggtggatgtgacggccctgcggttccaggccataatccacgattttgtcatgctcaattccctggaccggacaagggcctgccgggcggccatggatgtgtccacggaatggattaaccggaagaaccgggaaaaacagtaggccggtaaaataaaacaaaggcggagacagcgctcgggtctctgctttttcttttttaaaaggaagaaacttgaaaatgaacgttttctattttatactgaaagacagaaattggatggtatggataaaattacataagaggggggagctggattatgataaaggtatttcttgtggaggatgagatcgtcatgcgggatggcatcaagaacaacattccatgggagaaggaagggttggaattcgcaggggaggccagcgacggagaactggcctatccgcttatcagaaaggtgcagccggacatcctcataacggatatccgcatgcccttcatggacggactggaactctctgaactggtgaaaaaggagtttcccagaatcaaaatcattatactcagcgggtacaatgaatttgactatgccaagcaggccatccacatcggggtgacggactatcttctgaagcctattacggctgccaagcttctggaagcagtgaagaaggtggcggatgtgattgagcaggagagagaggatgcccgcctcatggataagtaccgcctggagatggcggagaacacggtgctggaacgccagcggctgctgcgtgacttggttacggggcgggtcaattttaaggaagccctggaacgcggggagcaggtggggatggatttgtccgcttccttttaccagctcatgctgtttaagcttatgccgatgggatctgccgtggcctattccgaccgggtggtatcctgccaggaagccattgaggaacggatggagagccggcagcacatcctggtttttgaccggggggacgagggatgggccttcattctcacaggggagtctgagcaggaggtggagcgcaggatgagggagtgcgccgccagtctgggagagctggccggggcctgtaaggacatacagtatttcggcggaatcggaagctgcgtgaaccgcctgggcgatttgcagacctcctatctgcaggcagggcgggcgtttgcggccaggtttttcacggaaatgaaccgggtcataagctacagccagatggacggaatggtccatggatccggggaaaccatagatatccactctgtggacgcgtccaaggtgaacaggaagaccctggaaaatttcctgaaacaggggactgtgggcgaggcatccgggtttgtggaaaaatatttccagaatgtgggagaaaagaactgccagtcctttatgttccgtcagtatattgtcatggactgctatctctgcgtcagtacgtttctggaacagctggggctggacataggacgccttccccgggaactgtcggatatggaaaaggtccttaaggacggttataccctggaggtgctgaagggaaagctggcgaagctttttggggaggtcatgaccttaagggacagccagacagccagcaagtacagccaggttctggacgaggccagggcgtttatccatgataattacgccaaggaggagatttccctgaacacggtggctgccagggtcaatataagccccagctatttcagctccatcttcagtcaggagatgggagtgacctttgtggaatatctcacaggggtgaggatggaaaaggcgaaggagctgctgatgtgctccaatcttaagacctccgaaatcgggtacgaggtgggatataaggattcccattacttcggttatctgttcaagaaaaccgttggatgtacgcctaaggagtacagggcgggaagcagggaggccttatgacgggaaaatggaggaccgggtccggcgggaaggagtgggacggaagccgtctcctggagcgcctgcccctggaaaagcgcctgaacctgatgacatttatcatcatcattcctctggcggtgctggttatctatctcatggcaacggtggccaagttctgcaatgcctacacccagagcataaccaacatcacccaggccaacagcgttacggccaacctgcgggaggatgtggactacagcatgtaccgcattgtcatagggatgcggacctaccagtccatccatgagctgatggaggaggacaggccctacggctgggagcagattaaggacccgcatcaaaccataagcgatgccagaaagacctaccgccaactgttaaagcggacgccggagggggccaaccggaccaggattaactggctgatgcactgcctggaccagctggaacagagagtgaacgagatagaggacaaccttccccacggcatgtacgataagaacatggaaattctggattacggcgtccgtgtgctgactgccgacatcgaaaagcagggaagggagtacgtgtactatgaaacgctccatgtccaggagatacagaaggagctggagagccaggagcacacggccatcgtggtcagcctgaccctgctggtatccattctgcttatcagccttctcctcagccgcaggataaccaaaagcgttaccgttcccatacagaagctctgcaacgagacagagagggttgcaaagggagatttcacctccggccccaagatcgaggcgggggatgagctggcaatccttacgggaagctttgaccacatgaaggaggaaatcgggcggctgattgaggacatacggcaggaacagaaccagcgccgggtcatggaactgcagcttcttcaggagcagatcaatcctcacttcctctacaacaccctggataccattgtgtggctggcggagggagggcaaaaccgggccgtggtggacatggtcacctccctgtcagaatttttccgcacaactctcagcggaggaaaggattttatcaccatgcgcgaggaaatcggccatattaaaagctatctccaaatccagaaggtccgctaccaggatatcatggactatgaggtcacccttgaaaaatccctggaggaatgcagaatcctgaagcttaccctccagcctctggtggagaactccctttaccacggaatcaagaataaaagggggaagggacgtatctgggtccggggatacgcaaaggaggacatggctgtgctggaggtggaggatgacggagcgggcatgacggaggaggagacggaggccgtcaggcgaaagctcagaggggaaaaggattcgtccttacgggaggggcctgctcccaagggaggttttgggcttttcaatgtggcggagcgcctgcgcctgaactatggttcccggtgcagtctggagttcgggagtgtcctggggctgggcacaagggcagtggtgaccattcccctggaatccggatatggcggggaaggggaggattgaaaaatatccaaccataatcgtaaaaaaacacccaaatgtatgaataaactgtgaaaaatctaaaaatcgtgtacaaaacaacggagaaattccgttgtttttgttattaacaactgatatgattattccaacaaggggaaacaaaatacaaatcaaggaggtttacgtattatgagaaaaaaaggattaagcgttatgttatgtgcagcaatggcagcatccctgctggcagggtgcggcggcggaagcaagcctgcagagacagcagcagctcccgcggcagctgagacaacggcggcggccgacaccacggcagctcctgagaagacagaggctgagacagaggctgaggcaaaggacgacgcggcatccggtgatttgattgtggttggttatgcgcaggttggcgctgagtctgactggagaacagctaatacagagtccttcaagtccacctttacagaggaaaacggctacaagctgatttttgacgatgcacagcagaaacaggagaaccagattaaggccatcagaagcttcatccagcaggatgttgactacatcgtagtggctcccgtagttgagacaggatgggaggcggttctccaggaggcacaggaagcaggaattccggttatcctgtccgaccgtcagatggacgtggatgagagtctgtatgagtgctgggtaggcggcaatttcatcaaggaaggcgagacagcaggaaactggctggctgattacttaaaggcacagggaagagacggcgaggacatcaacatcgttactcttcagggaaccatcggagcatccgctcaggttggccgtacagaaggttttggaaacatcttaaagcagcatgacaactggaaaatgttagatatgcagacaggcgaatttacacaggctaagggccaggaagttatggaatccttccttaagtcctatgacgatatcgatgtggtagtggctgagaacgacaacatggcattcggcgctatcgatgcaatcaaggcagccggcaaaacctgcggacctgacggcgacatcatcatcttctccttcgacgcagttaaggcagcatttgacgccatgatagccggcgatttaaacgcggcatttgagtgtaacccgttacacggaccgcgtgtagatgaaatcatcaagaagctggagaagggcgagactgttgagaagattcagtatgtagacgaagcttacttcgatacatccatggatttggaatctatcaaggctgagcgcgcttattaatcaacattttcgtaacagtacaggaaaggcggtggggagagtcgttgcacggctctcccccttttcaagcctgaggctggatgttttcaagtaactgagccctggagatggggcgtataacggtagaaaggcggaaatcgcatggagcagaacgttgttttggaaatgcggggaatcaacaagaatttccccggtgtaaaggcgctgcaggatgtggattttactttgagaaaaggcgaaatccatgcccttatgggcgagaatggtgccgggaagtctacactgatcaaggtgctgaccggcgtggaggagtttgaaaccggtacaatccggatggaaggctcatccaataccatcatcaaccggtcgccccaggaagcgcaggagaatggcatcagcacggtttaccaggaggttaacctgtgtcccaatctgtcagtggctgagaacctttatatcggcagagagccgaaaaaaggtcccatgattgactggaggacgatgaaggaggatgccaggaagctgctggagggactggatatccacatcgatgtgaccatggctgtagagaactattccattgccatccagcagatgattgccattgccagggctgttgatatgtcggccaaggtgctgattctggatgaacccacatcctccctggacgacggtgaggtggagaagctgttcgtgctgatgagacagcttagggccaagggaatcggaatcatcttcgtgacccatttcctggaacaggtatatgctgtctgtgacaggattacggtcctcagaaacggtacactggtgggcgaattcaaggtggaggagctgccaagggtacagctggtggccaagatgatgggtaaggatttcgacgatctggctgccatcaagaaggaaggcatgtccacggtcaaggaagatgtgatcataagcgccagggggctgggctgcaaggggaccatcaaacccttcagcctggatatccataaaggcgaggtcatcggccttacagggcttctgggctccggccgttccgagctggtccgggccatatacggcgccgataagccggacagcggcgagctggccgtaaagggaaagaagctaaaggtcaacgcgcccattgacgccatgatggaaggcatggcctacctgcctgaaaaccgcaaggaggagggaattatcgcggatctgtctgtgcgggagaacatcatcattgccctccaggccaagaaaggcatgttcaagctcatgagcaggaaggaacaggaggaattcacggacaaatacattgatattcttcaaatcaagacagccgacagggagactcctattaaacagctctccggcggcaaccagcagaaggtgattctgggacgctggcttctgaccaatccggattttctgattctggatgagcccacaaggggaattgatatcggtaccaagacagagattcagaagctggtcctgagacttgcggaggaaggcatggccgtggtgtttatttcctctgaaatcgaggagatgctccgcacctgcagccgtatggcggtcatgcgcgacggcgagaaggtgggagagcttaaggaagacgagctgagccaggattccatcatgaaagcaattgcaggaggaggggaagaatgatggggaaacttaaaaagttgacaggttacagactttttcttccgttatcctgtcttatcatagtactgttaatcaacctgattaccacgcccacgttttttaggattaccatcaataacggcgttctctacggatatatcatcgacgtcatcaaccgtgccagcgagctggtggtgctggccgtgggcatgaccctggtggtatctgcctcggcgggaaccgatatttccgtgggcgccgtcatggcagtggctgcggctgtgtgtaccagggtcctggcgggcggcgaggtgtcggtcaatgagtatgccaatccttacatcctggccgtgctggcagccctggccgtggcggtggtgtgcggcggctttaacggcttcctggttgcaaagcttaagatacagcccatggtggcgaccctgattctgtttacagcgggcaggggtatatcccagctggtgacaaacggacagattacatacatccgtgtggacggatataagctgctgggcaacaacataccgggaattcccattcccacccctatctttgtagctgtaatcgcggtggcgctcacctatattctgttaaataagacagccatgggcatgtacattcagtctgtgggcatcaatgagagggcatcccggctggtaggccttaaatccgtgaaaatcatctggatggcctacgcgttctgcggactgtgcgcgggaatcgcgggactggtggcatcctcccgcatttattccgcggatgccaacaacatcggcctcaacatggagctggacgctatcgcggcagtggctttaggcggcaactccctgggcggaggccggttctcgctgttgggctccgtaatcggcgcctataccatccaggccctgaccaccactctctatgccatgagcgtgcccgcggaccagattccggtatacaaggccattgtggttatactgattgtggctgtacagtcagaggagcttaagaaattcaggaaacgtctggcatccagacatgcgtccaggaatgtgaaagggggagcggcataatgaaaaacaaaagtgaaaagaaaaagctggacggcaactccttcctgctggctgtcactatcatactattctttgtaatgtacatagtcggcatcatcatgtttggcggaaggggatttgcaaaggtacagaacttcctcaacctgttcatatccaacgctggcctgattgtggtggcaacaggcatgacaattgtcatgatcacaggcggcatcgatatttccgttggttccgtggtggccatggtgtgcatgatgctggcctggatgatggagagggggaacatcggtgcgtttccggccatccttattgttctggtcacgggatgtatattcggcctggtacagggctttctggtggcctaccttaagatacagccctttatcgtgaccctggcgggcatgttcttcgctagaggcatgacctccattatcagccaggagatgatcagcattaccaacaagacgtttaccggcattgccacattcaagatgtatctgccctttggaggttatctgaataagaagggagtcatgatttacccttacgtatacccaagcgttatcatcgctctcgtggttctggccattgtatttgtagttcttaagtataccaagttcggccgttctatttatgccattggcggaaatgaacagtctgccctgctgctgggactgaatgtgagaagaatcaagcttcaggcttatgtgctggacggatttctggcaggactgggcggcctcttgttctgcatgaacacatgctccggtttcgtggagcaggccaagggatttgagatggacgccatcgcatcctcggtcatcggcggaactcttctgacaggcggtgtgggaaatgtaatcggaagccttttcggagtattgattaagggtaccattgaatccttcatcaccttccagggtaccctttcctcctggtgggtgagaattaccattgcggcccttctctgtttcttcatcgtgcttcagagcctgatcgcggccctgaagagaaagaacaagtaacaggaaacagcggtgccctgccgccaggcaaaagtaaacaaaaaacggttaaaaaattaacggaacattgagccagcaagcaggccgtcggcttgctggcttttgtttgcccagcatgggcgttttctaatgggtgaaagtcccaagtgcgcgtaggcaacaacgaagcacatagccgaacagcaagggtgtccgccgtgagacggaatctgaaagaagctgtaagcaaacctctgacctgacggacaggaaccgcatataaggctcggaaatacggataaggtggcaaaaggcactgaagtccaaaaggttgccggaagtacgagtaaatgcggcaggtacatggaggaaaagaacacgcaccttaactggggaggtctcacaggcggtctcattagccgtagtaacaacgaattgtgagaagtcagcagaagccatagtagtgaggaagttcctgtaatggggacggagcgaagggctgaacaatcaatcagttgaagtacgttccacttcgtagccggagcatacgcctgtcgatgacttcaaaggcggcaaaggcaaaaggggcagaaaggaaacaacgcatggacacaagcagtctcatggagcagatattaagcagggataatctaaatgcggcgtatctgcaagtcgtaaggaataaaggagcggcaggcgtggacgggatgaccgttgaagaacttggcgcatatctttcggaaaacggcgaaaacattaaggaacagttgcggacgaggaagtataagccgaagccagtccgcagggtggagatacccaaacccgatggtggtacaagaaatcttggagtgccaacagcagtagaccgctttgtacagcaggcggtggcacaggtgcttaccccgatatttgaggagcagtttcacgaccacagctatggattcagacccaagcggtgtgcacagcaggcagtccttaaagcattggaaatgatgaatgacggacacaactggatagtggatatcgacctagcgaaattctttgacacagtagaccatgacaagctgatgacgattttcggacggacaataaaggacggagatgtcatatcggtggtaagaaagattctggtcagcggcgtaatgattgatgatgagtatgaagatacggtagtcggcacaccgcagggtggaaatatctcgccgctgttagcaaatatcatgttaaatgagctggacaaagaactggaagcaaggaggctggatttcgtccggtatgcagatgaccttattataatggtcgggagcagacaggcggcagagcgggtaatgaagagcgtggctcggtttatagaggaaaagcttggactgaaagtgaacgcggaaaagagcagggttgataaaccaaagggcattaagtatctggggtttggattttactatgactcatttgccaaagggtacaaagccagaccacacccgaaagcggcagcaaagttcaaggcgcagatgaagaaatatacaagcaggagctggggagtgggcaatggttataaaattgggaaactcaaccggcttatccgagggtggataaattatttcaaaatcggaagcatgaaaaggctgtgcgcaaaaatggacggacagattcggtatcgactgcgcatgtgcatatggaaacactggaaaacgccaaagaacagggaaaagaatcttatcaaacttggtctgccgccaaatgcggcacatggcatttcatatgccaaaggatatgccagagtgtgcagaagctggaatctccacatttgtatcagtaaagagagactagctaagtttggtcttgtatccatggaagactactacgccgaaaaggctgttacatgttaagttgattgaaccgccgtataccgaacggtacgtacggtggtgtgagaggtcggaaggcgaaataatcgccttcctcctactcgattttgcgtccggggaacaggattcggaactatttacatggtgaaacgagtcgcttttgggtgaaaatggaaaaaatgacgttaaagttgtacgtacaataataaaaaatataaaaaagttctaaatacctattgacaaaaatagaacaaaaatgtatagtgtatttaaagaaaaacgcaagaaatattggcgaaactcacaatgaagatggagtaaaatctacaaaaatgcaaaataattcaaatgaaccaggggggaatgggacaagggttagctgaattaacgaaagtacaagcttgtgaacatgtacacaagttgtatgtataaattaaaccatgggaggtaacatatgaaacgaaaaattataagcatgattctggggacggcaatcgcagcttcactgttaacaggatgcggcggctcacagcaggcagcggcaaccacagcggcagcggcaggggacaccacagcagcggcggcagattccgccgcggcagctgacgcggctgcagaggcagccaaggcagcaaccggggaaggcaagaaggtaggggtggccatgcctacacagtcatccgagcgctggattaacgacggcgccaacatgaaaaagcagctggaagctctcggatatgaggtagaccttcagtatgcagaggatgatgtacagatgcaggtttcccagattgagaacatgattgcgtccggcgttaactgtctggtaatcgcatccatcgactcctccgcacttgtaaacgcagaggagcaggctaagaacgcaggcatccccatcattgcttatgaccgtcttctgatggataccgacgcagtttcctactatgcaacctttgacaacaagggagttggtactgcaatcggcaactacataaaggaagcaaaggacttagacgcagccaaggcagccggcgagtcctacaccatcgagttcttcatgggctcacctgatgacaacaacgctctgttcctgtacaacggactgatggaagtccttcagccatacctggatgacgggacactggtctgcaggtccggacgtacctccttcgaggatacatgtatcctgagatggtcccaggaaacagcacagcagaactgcgagaactacctgaccggtttctatgctgacgagaagttagacatctgcgcaagtgcgtttgacggtttcgcatacggctgtaaggctgctctggaaggcgccggctataaggttggcgaggactggcctctgattacaggacaggatgctgagctgatggcagttaagaacatcatctccggttaccagacagcaaccatttacaaggacacacgtctcctggctgagaagtgcgtaaccatggtacaggctgttctggaaggcgcggagccggaaatcaacgacaccgaacagtacaacaacggcaaggttgtggttcctgcttacctgtgcacaccggtagcagtagacaaggacaactataaggaaattatcgtagacggcggctactacacagaggagcagctggcacagtaaagatgattcgggcggcggcataggttccgccgcccgattgcgctttttacagagtatttttcaagaaaaggagttgaaaagatgtccgaatatattttggagatgaaccacatcacgaaggaattctcgggcgtaaaggccttggacgatgtcaatatcaaggtaaaacgcggagagatccatgcgctgtgcggagagaacggggctggaaagtccaccctgatgaatgtgctgtccggcgtttacccctttggttcatacagcggggatatcgtgtataacggcaatgtgtgtcagttccacagcatcaagcagtccgaggcaaagggcattgttatcatccaccaggagctggccttaagcccgtacatgtcggtggctgagaacgtatttctgggaaacgagcagaaggcagccaagggtatcattgactggacccttacccataagaaggcccaggaaatgcttgaaaaggttggactgggaggcgagaacctgaacgcgcccatcagcagcctgggtgtgggaaaacagcagctgatagagattgccaaggccatggccaaaaaggtggagctgctgattctggatgagcccacagccgcgctcaacgacgaagagagccgccggcttctggacatcatgctggaccttaaatcccatggaatcacctgcattattatctcccataagctgaacgaaatcagttacgtggcagattccattacggttatccgggatggaaagaccattgagaccctggagaagggcaaggatgattttacggaagaccgcatcatcaaaggcatggtgggacgcgagctgaccaaccgttacccggaacggcactgtgaaattggtgatacgattttcgagataaaggactggaatgtgtaccatcccgacgacgcccagagacaaatcatcaaggacgtttctcttcatgtgcgcaaaggcgaggtagtgggcctggcaggacttatgggcgcgggacggaccgagctggccatgagtatattcggcaggtcctacggacagaaaatcagcggcgccattaagataaacggcagggaagtacatataaaggacgtaaaggacgccatcaacaacaagctggcatacgtgtccgaggacaggaagaactatggacttgtgcttatcaaggatatcaagtggaacatgaccctgtccgccatgaggaatttcttttccaagaacggcgttctcaatgaaaatgatgagattctggctgcggaggattacaagaagaaaattaacatcaagtctaattccattaaccagaccgttggctccttatcgggcggcaaccagcagaaggtggttctcgccaagtggatgctgacacagccggatgtgctgattctggatgagcctaccaggggtatcgacgtaggcgccaagtatgagatttactgcgtcatcaatgaactggcaaagtcaggcaaagcggtaatcgtcatctcctctgagatgcaggaggtaatcggtacctgtgaccgtgtatatgtgatcaacgaaggacggattgcaggagaactgaccaaggaagaggtaacccaggaacgaatcatgaaatgtattatggcggataatggaaaggaagcgtagagatggataagaagaaaacagttaatattgatatgaagcagtatggcatggtacttgctttaatcgcggtgttcttgattttcgcagtcatgaccggcggaaagaatatgtcgccggccaacatcaacaacctgatcatgcagaacggatatgtggtcatcctggcagtcggtatgctgttatgtgtgctgacaggcaacatcgacctgggtgtcggctccatcgtggccctgtgcggcgcaaccgtaggcatcctgatgattgactaccacaccaatatgtgggtcgccatcctggctgccctggcagtaggcgttctggccggtatgttcgtggggctgttcgtatccaagctgagcatcccgccctttatcgtgaccctggcaaccatgcttatgggacgcggacttacatacaccctgttaaaggcccagacaaagggaccccttcccaccagctatacttacatcggcgcaggcttcctgccaaccatgaaaattccctttggaaacggcaccctggacgtggtttccattattgtggcaggcattgccacggtactggtgatcatggcagagcttaagagcattaacaccaagaagaaatatggtttccccatcaacccattgtggcagattattataaaggaagccgtcatactgatgattgtatggttcttcttctacaagctgtcacgctacaacggcataccgtttgtactggtaatcatgggcgttctggttggcctgtatcatttcatcaccagcaagaccgttgccggacgccagatatacgccctgggcggcaacgccaaggcggcaaagctttccggtatcaatactgagaaagtgttcttctgggtatacaccaacatgggtatcttaagtgccattgcaggtatcgtgctttccgcacgtaatgcatccgcaacccccaaggccggagacggtttcgagatggatgccatcgcctcctgctacatcggcggcgcggccaccagcggcggtatcggaaccatcatcggagccgtggtaggtgctttcatcatgggtattctgaacaatggcatgtccctctatggatggtccaccgatatccaaaaaatcgtaaaaggcgctgtacttttaggtgcagttacggtagacttgttatcaaagaggaaaaaaggataggttttgattatgggtacacaggagctgaaatataaggaagtctataactgggtgttggacaacattaacagcggggctttgaaggtgggcgagaagctgccttcggagaatgaactcagcgggcgtttcgggctgagccgccagacggtgcgccatgccgtggatattctggagcagcagaagctggtcatgagggtgcggggaagcggtacttatgtgggcggcaacggcaagacggagcgccaggaacggtacatgaacatcgctgtaatcagtacctatgtggacagctatattttccctcctgtggtgagaggaatcgagagggttctctcaaaaagaggttacaccacccagattgccttcaccggcaaccgggtgagcagggaacaggacatattgaataatcttatcgacaaagacatcatagacggactgattgtggagccggccaaaagcgctctccccaatccaaacctgcattactaccaggagcttaaggaacggggaatcccgattctgttcttcaacagccggtatccggaactggagctgccctgcgtgtccatgaacgacgagcaggtgggcaagaaggccgtggaatatctgattaagaacggtcaccaaaacatcggaggcgtgttcaaaagcgacgacggacaggggcatttgaggtacaaagggttcctgtcaggcatgctggaggcgggaatcaaggtaaaggatgccaatgtggtatggctggacacggaagatttcctggacctggaccagtggtcggattacctgttccacaggctggagggctgtacgggagtggtgtgctacaacgatgaggtggcgtatgtgctgtcaggtctctgcgagaagcggggcattgtcataccggaccagctgtccattgtcagcgttgataattcggacctggcaaccctggccagcgtaaagcttacctccttcccccaccccatggaggccctgggcaggaaagctgcagagaacatgataagtatgattgagaatccctactttgacggtaactatctgtttgattcggatattattgaacgggattccgtaaaggtcctggaacggccgcgtaaggagggaatgtaatgggtgcgaaaaaggaggcaaagagagaagaaagtgccgcgaaaccgactcagataaccgtaatgctgcgtctggtggcgggaggctatctggtatacctggcctttggcctgctgcaggagtatttaaaacctgccgggggaggcaagatggtacagctgggctgtggggttctttttggcgtcataggtgcatttctggccggctggtctcttaagaaatttataaaaggcgaatatattaagtatggcgaaattccggatgatgaggaagatgatcagacggaggatatctaaccggcaattgctttaactgacaatcaaggaggatgagagatatgatagcagtaaagaattataagttctggttctgtacaggttcacaggatctctatggagatgagtgcctggcgcatgtggcggagcattcgggaatcattgtggacagtcttaataaatcaggcatcctgccctatgaggtggtgttaaagcccacacttattaccaatgagctgatccgcaggaccttcaacgaggcaaatgcggatgaggagtgcgcgggcgtcatcacctggatgcatacattttcaccggccaagtcctggattctgggactgcaggaatacagaaagcccctgatgcatttccatacacagttcaaccaggagattccctacgattccattgacatggatttcatgaatgagaaccagtccgcccatggagacagggaatacggccatatggtaacccgcatgggtattgagagaaaggttattgtgggccactggagagatgaaaaggtggtgggccgcatagcagcctggatgcgcaccgcggtaggcatcatggagagcagccatgtaagggtggcgagatttgcggacaacatgaggaatgtggctgtcaccgaaggcgacaaggtggaggcccagatgaagttcggctgggaagtggacgcctatccggtcaatgagctggccgaatatgtgaaggctgtgccaaagggagatatcacggcattggtggacgagtattacagcaagtacactatcttgctggagggcagggagccggaggaatttaagcgccatgtggcggtacaggcccagattgaggctggccttgagaagttcctgctggagaaggattaccacgccatcgtcacccactttggggatttgggagagctgcagcagcttccgggcctggctatccagcgtctcatggaaaagggatacggattcggcgcagagggcgactggaagacggctgccatggtcaggctgatgaagattatgacccagggcatgaaggacgccaagggaacctctttcatggaagattatacatacaacctagtgcccggcaaggaaggaatcctggaagcccatatgctggaggtgtgccccaccattgcggacggggaaatcagcatcaaagcctgcccgctgtccatgggcgacagggaggacccggcccggcttgtattcacatccaagacaggtcgcggtatcgccacatccttagtggatctcggcacaaggttccgcctgattatcaacgatgtggaatgcaaaaagacagaaaagccgatgcccaagcttccggtggcaaccgcattctggacgccggagcccaacctggcaaccggggctgaaagctggattctggcaggaggcgcccaccatactgcattctcctatgacctgacggcagagcagatgggagactgggcagacgccatgggcattgaaacggtctatattgacaaggataccaccatccgcgggcttaagaacgagctccgctggaatgcggcggcttataggtagccttaataagcaagtggaggggcaattcatgagtttagatataaataagataaaagaacagattgagcatggaaatacttccctgggcatagagctgggctccaccaggattaaggcggtccttatcggtgaggaccacacacccattgcctccggcagccatgattgggaaaacaggtacgtggaccacatctggacctataccctggacgacatctggaacggcgtccgggactgctacggcaaaatggctgaggatgtgaagaaaacctacggcatcaccctgaccaccattggttccattggattttcggccatgatgcacggttatatggcgtttaataaagaaggtgaacttctggtgcccttccgcacctggagaaataccatcacaggccctgccgccgggaagctgacagaggtattcaggtacaacattccccagagatggagcattgctcatttgtaccaggccattctcaataaggaagagcatgtgaaggatatcgactacctcattacgctggagggatatgtgcactggaagctgacaggcagacgtgttctgggtatcggtgatgtggcgggcatgttcccggtggatatccatgccagggattttgaccagaagcgtgtggagcagtttgaccaactggtggcaggggagaatttcccgtggaagctgcgggacatcctgccgaaggccctggtggcgggagaggacgcaggcgtcctgacggaagaaggcgcaaagcttcttgacgcgtccggaaacctgaaagcaggcattcccatgtgtccgcctgagggcgacgcgggcaccggcatggcggccaccaacagcgtggctgtccgcaccggcaatgtgtctgccggcaccagcgtgtttgccatggtggtgctggagaaggagctggaacacgtatatccggagattgacctggtgaccacgccggcaggcgatatggtagccatggtgcactgcaataactgcacatcggacctgaacgcatgggtgaacctgtttaaggagttctcagaggccatgggcatgaaggcggacatgagccagctctttggaaccctttacagcaaggctctggagggagattccgactgcggcggcctgctggcgtacaactatttctcaggggagcacatcacccactttgaggaaggccgtcccctgtttgtgcgcacaccggacagccggtttaacctggcgaatttcatgagagtacacctgtacacctccctgggcgctcttaagacaggtatggatatcctgcttaagaaggagcatgtgaaggtggacagcattctgggccacggcggactctttaagacaaagggcgtgggccagagaatcctggcaggagccatgaacgcgccggtatctgtcatggagacagccggggaaggcggcgcctggggcattgcgctgctggcctcttacatgcggtgcaggggagaaggcgagaccctggacgcttacctggcccacaaggtttttgccggtgacaagggaaccagaatggagcctgtgaaggaggatgtggaaggattcgaggcattcatgaagcggtatgcggagggccttgccattgagaaggctgctgtggagcatatgaaggattgagcggccaggctgtggagtatagaaggattaacaggaacgggagcgtatacagactatgttagaagaactgaagcaaaaggtatatgaagccaatatggagctgccccgcaggggccttatcacctacacctggggaaatgtcagcggcattgaccgggaaaagggactgtttgtcataaagcccagcggggtggattacgatgtgttaaagccatctgatatggtggttatggatctggagggcaataaggtggagggggagatgaacccttcctctgacaccgccacccatgtggagctgtacaatgggtttaaggagattggcggtattgtccatacccattccccacacgcaacggcctgggcacaggcgggcagggctcttccctgctacggcaccacccatgcggactatttttacggtgagattccctgcgccaggaacctgacggcagaggaaatcgaggaaggctacgagaaaaatacgggaaaggtcatcattgagaccttccaggggaaaaaccctgtttacattccggctgtgctgtgtaaaaaccatggcccctttacatggggcagggacgcggctgaggctgtccataatgccgttgtgctggaggagattgccagaatgaatttcatgacagaactcatcaatccccaggcaggaccggctccccagtgtatgcaggataagcatttcatgcgcaagcatgggccaaatgcttattatggacaggggaagtaaaagggaccggctgacgcctgtctgttccccgggcaaatgaatgtgcgatatatagtaagaaagcccgcagaggcggtccttgtgttatagggatttgtcctgcgggttttctttgatttttattctgctttctttggtttttattcggtctgttaaaatgatgcgtaccatggtacaatgttggtatgtttttataatgaggagtccgttggcaggcttttttagcttgttttgaaggagctggtggaagtgagaatgtctgttgccggaggaggagaaagatggatttttataaaagggtggggattacagtgagggcggtaccggaaggaaaggtggccacctatggtcaaatcgccctgctctgcggaaaaccgaaaaacgcaagacaggtgggatatgcgctgaaccgcggtctggccggagaagttccggcccaccgtgtagtcaacagccagggatatctgaccggcgcagcgtcctttgaacacccggacctgcagagaatgcttctggaggaggaagaggtcctggtatcggcggagggacgtgcggatatgaaacgggatggctggaagaatacgctggaggacgcgctcagactgaaggagatgtttgagcgggaggggatatgaattccggcggccggatgatgtgtggcggagaatagatatgtgacagcgaatagatgtgacagcgaaaaggtgacagctgaaaggtgacaatgaaagagtgggagaggaggcagcggaacatccatggaacagcagtttgcgggatggagaaagaagtattttacaatttggaccggccagggaatatcaaccctgaccagctccatcgtacaaatggcaatcatatggtatataaccggaagaacaaagtcagcggcagtcctttcctttgcaacgctggcggggttcctgccccaggcagtgcttggaatgttcatcggcgtactgattgaccggcatgacaggaagaaaatcatgatatgttcggacctggtgatgacctcagcctgtgtggcgctggctgtttcgggaatctggggagacattccgatttggatgattttcattgtattatttatccgaagcattggcaatgcattttacgccccgtcccttcaggccatcatgccgtccatcataccaaaggaccagctgacaaaatacgccgggtattcgcagagctttgaatctgcgtccatgatagccagtcctgccattgcggctgtattgtacagcgtgtttccgctgaaagttatcctgatgctggatgtgttaggagcgatttttgcagtggcaaccctgacagcagtggatataccagcgatttccagggaagataaggacaagacaaatctcctgggggaggttaaggaggggtacggcgtcatgcgcagtgtgcccggaatgcgggagcttctggtgattggcgcattgtatgcagtcatatatttctccataggaaccctgtatccgctgattaccatgtcctactttaacggcggcgtcagggaatcggggctggtggagactgtttttgcagtgggtaccctggttggctctgtttccctggggatatggggaggacggatagacaagataaaggcaatcgccgggtccataggcatatatggagccgggaccctggtaaccggtctgctgcctccaaacggtttttatgtctttgtattcctgtcatttttcatgggagtctctgtacccttttattttggggtacagacatctatttatcagattaaaattcagggagaatacctgggcagggcgctgtcattgtccagcagcatcagcatggtggcaatgcccctgggactggtgctgtcaggagccctggccggtccgctgggaatcgagaactggtttctgatatccggcggggcagccttggtgattgcggtgttagccttaactctgcctgctttgcggcactgtatggacggatgattcctgcaaagtacttctcagggagtaccccggcaaaggggcctaagaagatttggggcagaaatgccaccaggccggataatgccatcatcataggagaaccggtctcgctggccagccaccaaatcagggaaaactggacagcagagcttccgatcagggacacagtctggccagctgcaatggtcagaaatttctgtttccattttgaataatcattcatattatacgatcctttccatattctgtgtcagacctgacagggctgtcctgttctgcctggtttctcccaaacccagtttggcagcatacaacataaacacagcataaaaggcagataaagccattacggttctatctgccttgcctgtatgtagaaaacaaactgtccccggggtcagcggcgggcaattcatatattacatgaagctatatcaggcgtatctgcatctcatccgtaaaacagacataacaaaaaaaacatatcaggttttatttacttgctgtttatcttaaacgaatggaaaaatacatcaaacgccctcctttttataaagtacagtcatcatatcagaaaaaacacggtatgtcaaagtaaatttaccggggaaatcctcaaaatgtttacagggcagaaggaggcgggataatggggaggtttactgtaaaggtggtgccgatacctgcctcgctgatgacccggatttgccctttgtgcaggtgcacgattttttccaccaccgtgaggccgatgccgtttccctctgcggtatgggaactgtctccctggtagaaacggtcaaatatgtggtttttcgtctcctcatccatgccgcatccattgtccagaatctggaataccacctggtccttcttcttatgcagcttcagctttatctttccgttctgaggagaaaatttgatggcgttgtcaatcagattgatccatacctggtttaggagggccttatttccgcggtattccagttcgtccaaatcaataaacagttccagttgctttttctgccattttgattccagcagcaggacggactggcgtacttcttccgacaggtcaaaggactccatatcggacagtatgctcattttttctatcttggacaggttcagcacattagtggagagctgggacaggcggttggattcacttatgataatgtccagatattcgtcccgttcctcctttgtgaggccgtcgttttttaatattttggcaaagcctctcagggatacgatgggagtcttgaattcatgggaaaaattattgatgaagtcagagcgcagcagctccgtgttctccagttcctgggccatgcggttaaagctttcggagagacgttcaaattcacggttcagatccaggtggatgcgcaccttgaagttgccgtccgccagctggttgatggcttcaatcaggtcccgtatgggtttgagaggaatgcggctcaggagcagggtaaggccggccccaaccacggcgctgagcacggccagcaggggaatggggcgccagaactggggaatggggatattggcctggtagaaaatcctccagtaaaggtacatcaaaaatccctgcagggtcatgaccgtgagcatgattaagaagatgcctgcggtcagtatgagggtcatggttcccagcggtttatggtttgtcctgcgtctcatagatttttcaccgccttgtagcccagaccgcgtatggtttcgatggtaaactcagggtaatcctcaaaacgcttccggagccggttaatgtgtacattgatggtattgtcgtccgactgggattccatgccccatatctcatccatgagctggatgcgggtgaagatcttgccgggataggacaggagcttatacagaagatagaattccttgcgggggagagtctggctttcattcccgcggcttacggtcagggagtcgtagtccaggcacacatcaccgatggtgatgcgccgttcgttcacaatctgagccctgcgcagcaatgcccggatgcgcagaatcatttcctcctcatccacaggctttgtcatataatcgtctgttcctacaatgaaccccttccgtttgtcctccggcagctgcttggcagtgaccatgagaatgggcagggtgtaatctgttgccctcagctgtctggtgagctcgtagccatccatgcctggcatcatgatgtccaggataaccaggtccacatggtgggtatctaataatttcaaggcttccagtccgtcgcatgccaggatgggatggtagccgtgttccttcagtacagcttccatcagccttcgggtattcttgtcatcttccgcaaccagtatctgaaacatgttcctttacctccctttactactacatttcattatacatatataacactcttttataaagtaaacataaacgaatcattcttatgggtttatgccatatttataccgtaaatgtctgtttatgtatagctttagtatcaaaaatgagaggaggtgaatgacatgccagctttatctgtggcagatttagctatacttaatggctatcaatatccgggaggtgtgaatgcggctgctgttatcaacaatatatgtgatcgggtccgcctgattccgtgctgttttcggtcattttatgtcattgtatccggcgcacagtaaagtcacaaaaaattcacagaataacgcgaaattaatgactttcaggctggttttgttaatgttgaattaatctttaacctttaatattaggaatcagttgagtaaaccagcaaaggagattgaatatgagcaagagcaggaaaataaagattggcattgccgccggaataatcgtcatactggccgtggcaatgattatgacgaagggcggaaaaaaatcaaagggcggtatgcctgtgggacaggaggcttctgtcacggtggtgaaggcagaacggccgtcaatcggcgatatcatccttaccacagggcttacaggcacagtggagccttccgatgtggttcatatctatgcaaaggcagcaggggacgtcacggcggtatatgtgaaggcaggggatatggtgacacagggacagatcctgcttgagattgatacagagcaggtggagacggcaaagaactccatggattctgcatccgtatccctttcagaggcccagagcaacctgagaagaatgcagattctttacagcggcggcgatttgtccgagcaggaatacgagcagtatgtcaacgcggtgaaatccgcgcagctccagtatgagtccgctaaactggcttatgaaaggcaggtgcagtacagctccatcaccgcccctattaatggaaagattgaaagctttgacgtggaggtgtatgacagggtgagccagtcccaggatttgtgtgtgattgccggtgagggtgagaacgtagtctccttttatgtgacccagcgcatgatgcagaatgccaatgtgggcgacgagctggaaatccagaagaacggaactacatataaagcatatatcagcgaaatcaactccatggttgatacggatacagggctgttcaaggtaaaggcccagattgaagacacacaggagattgcccccggaagcacggtgaaattaaaccttgtgacggaacgggcattggagacaatggtggttcccgttgatgcaatctattatagcggcggcaatgcctatgtttatctgtatcaggacggcaccgcctccacggcccaggtggaagtaggactggaggatgaggaacatgcccagattctttccggcctgtcagccgatgacatggtggtgagcacatggagctccaacctgtatgagggggcgaaaatacggttaaggtatgaggcacagtccgaagaaacagcagcatccggcggggaacacagcaaaaatgcaaaatcacaggcagaacaggaggcataacccatgggattgacaaggtttgtattaaaacgtccggtggcgacggttatggcgttgctttgccttttggtattcggtatttcttccgtattcaatgccacgctggaacagatgccggacacggaccagccaatgctgattatcatggcatcttattccggtgctggtcccgaggacatagatgaactggtgacccagcccatagaagaccaggtgggaaccatagagggggtgaaaagcatgagctccacttccagtgaaaacagggccatgattatgctggaatatgattacggcaccgatatggacgacgcttataatgatttatcccagagtctggatgcgctgagccgccagctccctgacgatgcggaaacctctgtcatggagatgaataacaatgcgggaaccaccatgatgctttccatatcaaacccctcccaggaggatttgtacgattatgtggaccagaccgtggtgcctctgctggaacagatttcttccgtggcggaggtggaggccatggtcggaaagtcagaatactataaaatcgagcttcaatccgatgagatggcacagtatcaggtgaccatgagcgacgtgtccacggccatgagcacggccaatctttcctacccatccggcgatgcggtatccggaaagctggagctttccgtgtcaacgtccctggagcatgagaccatagaagccctgaaggaagtccccatcaccacctccagcggaaagattgtatatctggaggacattgccagggtatatgaggcagaggagagccggggaggcatttcacgctacaacggcgaggatactatttccatttccatcaccaagcagcagagcagcactgccatggatgtgtcatccgaggttcaggaggttattgagagcctggaggcggatgatgagaacctgaatatcaggattgtcagggacagcgcggacagcattctcagttcccttaaggacgtggcccttaccctggtgctggcagccgtgatttccatgattatcatattcattttctttggagattataaggcttccctgattgtaggaagctccatacccacctccatactggtgtcgctgattctgatgaccagcgccggtttctccctgaatatcattaccatgagcggtctggtgctgggagtaggcatgatggtggataactccattgtggtgctggagagctgtttcagggccatagagacagaggaggacaagggcctgctggggtatgccaaggcttccctgtccggaaccaacattgtgctccagtccattctgggatccactgtgaccacctgtgtggttttcctgccgctggtatttctgcagggcatgtcgggacagatgttcggctccatgggatacgttatcgtattctgtatgtgcgcctccttcctgtcagccattaccattgttccccttacctatatggcctataagccccaggagaggatgcaggcgcccatgtcgcggcccatggagcggatacagaacggataccgccgcatcatgcccggacttttaaaacacaaggccatcatcatgattgcatcagtaatcatcgtgattgcaacctattttctggccagcgggatggagactgagcttatgaccgcggacgatacgggaacagtcagcgtttccatcgaaacaaggccgggactgctgtcggaaaatgccgacgccatgctgacccaggcagaggagattgtcaaaggtcatccggatgtggaatcatacatgctgcgctataacaatgacagcggtaccataacagcctatctgagggatgacagggatatgagcaccgatgagatagtggagcagtgggaaacggagatggcggacctggataactgtacggtgacagtggaggcgtcctcgtccatgagcttcatgagcaggagccggggatatgaagtcatccttaacggtacggattacgatgagctccaggaagtcagcagcaggattgttgccgagatgacggccagggacgatgtgatgaacgtccattccagcatagaaaatacggctcccgtggtgactgtgaaggtggatccggtactggcggccgcagaggggcttacggcatcccagattggttcccaggtaaaacagatgatggacggcgaagaggtgaccaccctggacgtggatggaagagaggtcagcgtgatggccgaatatccggaggatgagtaccggaccgtcagccagatgaaggatattatactctccaagccctccggaggctatgtggcccttacggatgtggcggaaatctattataaggacagcccggcatccatttccaagacggataaggcgtatgagataaccattacggcagattataccgggggaaatgtccagtccgccatagacagcgaggtcataagccccaacttaagcgccaccatcaagaagggcgtcaactccatgaaccgtatgatgcaggaggaatttgcagccttgtaccaggccattgccatcgctgtattcctggttttcgtggtactgtcagcgcagtttgagtcaccgaagttttcctttatggtaatgaccaccataccattcagcctcataggctccttcggccttttgcagattacgggagtcagcatcagcatgacgtccatactgggattcctgattctggtcggaacggttgtgaacaacggtatcctctatgtggatacagtgaaccaataccgcatgaccatggatctaaagacctccctgatcgaggcgggcgccacacgtttaaggcccattatgatgaccagccttaccaccatcctttccatgattcccatggccctggccataggggacagtggttccaccacccagggtctggctattgttaacatcggaggactcagcgtgggcgtggcggtggccctgttcattctgccaatctactatgcgctgatgaacggcgataagaaacgggttgtgctggatatttaaagaggaggtgtcaatcatatgagatacggaaaaataggggccggatgcctggccgcggcactgtgtcttggcgccatgccggcgccggcgtgggcgggtacaccggagtttgcctataccgcagagcagtgggcttccctcagggataatcagctggattttacggagatagcggacctgattcatgtatacaataacacggtgattcagaaccagctggagtatgaggatttccgggggaaggacgcggacgatattgcggatgattactatgatgctgccgatgatatatacggaagcctggaatatcctgattcgtcggattcagattatgccagccgcctgtcctcctatttgagcagccagattcaggctgataacctgcgggaacagggagacgacaatgtggaggacggggacgtcaagaagctggaatatgacaagacagaggcgggtctggtaaaggaggcccaggagctgatgataagctactggagccagacatacagcctggaaagcctggagcagaataagatacaggcccagtcgtcctatgaccagacccttacccgtctgagcgccggtatgtccacccaggcccaggtgctgtcggcccgggaggccgtcacatcggcggatgcatccctgctgtcggctcggagcagtctggggcggacaaaagaaaatctctgccttatgctgggatggacctatggggcgcaggtggatataggagatgtgccggagccggacctggagggaatggcagccatcaatctggatgaggatgtatccaggggagtggaaaataattacagccttaaaatacttgaaaagaaaatagccaatgcaaaaagcggcaccaataagtcaagtctggaacagagcttaaagagccagaaggagacagctgcctccagcataaagaatgcctacgagagcatgatgatatctaaatccgactacgagcaggctcttaatgcatatgaaattgaggcgacagccatggagacggcagagcggaagataacggccgggaccatgacaagaaacaattatataacacagcagtcctccttcgcaacagcccaggtcaatgtgcgtacacagaggctggctcttctcagggcacagctggaataccaatggtcggtggacggactggcatccgtgtcataggatgggagagatttggaaatagcggagaaatatttaaagtgcaggaaaaaggcaggatggaacagaggtgagacaatgaaaaaccgcagtcatgtaaagggaagcagcaggaggcgtgagaacagaaaaaagactgtcatggtccttttgacaatggtactgtgcctgtcgggaaccggcgtccggacttcctatgcatcccaggaagcatcccaggccgctgtcccggatgcgtctcaggacatatccccggcaaccacagggaacgcaacgggcaccacaatcattgaatacggcaatctgagggaactgctgaaacagggaaatctgtctttaaaagagagcatagaggactacgaggacaatataaacgcctatcaggaaatatgggatacccttaagcgggagcaggacaacatggaggataaggcggaggaaatgggcggtgaggacagccagacagccgggatctattcctccaatgcagccatgttaaaatcctcggccagccgcatatacagccagctggacaccatgaccagcgaaaagagcacccgcagcctggaaaagtccgcggacacctttaccatgacagcccagaccctgatgaattcctacaaccagatggtacagaatgtggaataccaggaaaagcgggttgagtccttacaggcagcctttgaggccatggtgagaaagcaggcagccggtaccgccacccaggcccggctgaaggaagcaaaaaaaagcctggacactgccggaaattccctggagtccctcaggctccaggccggggagctgcgccgtcagctgcttaccatgctggggattgaggacagcagccaggtggtgataggagccataccggagccggatatggcagccattgaagccgttgattatgaaagcgataagaacagagccatgggaaatgacaagaatgtgcagaatgcccgccacaccccggccagcagtaccactgaaatcaatatcaggttcaggctggcggatgaggcggaggggacaaaggaggcagcgtttttggcttcctaccagaaccttcaggccagtaaaacagcctatgaggcggccctcactgccttccagagcgcccggctgacctacgaaggactccagagaaagcagcaggccggactgctgacaagcacggaatacctggagggccaggcagcctatctggagaaaaaggcggcaaaagaaaccgcctccatgaacctggcggcggcctatgaatcgtattgctgggatgtgaaaggaatcagtcagacgtgatatgtctggccggaatccggacagtaacctcagtaccctttcccaaggtgctggtgaaggagaggccgtaggattcaccgtacaggctcttcagccttaagttggtattatagacgccgatgtggccgggaaaggcagtgtgcctggggctggcggaggagtcggtaccggcattcacgtcatcctttaatgtatcaagtgtttcaggcggtatgcctgccccgtcgtcagagatgatgaatacaatatcatctccatctggccagccggtgagcaggatgctgccttttttttcttccttcatcatgatgccgtgaaggaaggcattttccacaatgggctggaaggtgagcttggggatcgtgtactcacagatttcttccggcacatccaccacaaaggccacgcaattgtcataacgcatgttctggagacggacatagaggcttacatgctccagatccttctcaatggaattcatcagctccctgcggctcagggtaagcttataaaagcgggacaggatctggaccgcttccgtaaccttttcgctctgcccggtctgggacagccagttaatcatatccagggtattatagagaaaatgcgggttaatctgggcctgcagggcgcggaattccgccatccggagttcatcggaagcctttttctggctgtccatcagggtgatgatttcttctgtcatgtagttgtaggtatcggacagcacgccaatctcgtcgcagccagtgtcagccacatccatgggctggggcgggccggtgcggacagtctccatctgcagggccacgcctatgatgcggtccgcaatggagccggacaggcggaaggcagtgtacagggccagggcggtgaacagcaggtaaatcagggcaaaatgcatcatcagcgccctgcccgcatctccgatatggagggcggggataatggacatcatgtaccagtccgtgtccgcgatgggaaaataggccacataggcagagccgtccagataggagacaagggaaaacgtcttttcctttcccacccgctgcctcaggtccgggcggggaatgaagtatttcccggccaggcccatgtccgaggcggatacgatcacatcccgctcatttaccaggaaggcagcctcgtccgtgaccgtggcgtcattgcgcagcaccatgtcaaaggccggcctggaaagatacagggccacataggcagaggcattttcaatgccggacacagcgccgccgtcatgagtataaggaattcgggtgatgtaggccagctttccgttcttctctgtctcgtccggcgtcaggtacagttccgggcacagcagacgggcctgatccgaagtgctgtagatgccgtaccagtagctgctgcttactgaggataccgggttaaacagggcattcccgatcttgttgtactgcatcaggtctccgtatacgctgtcatcataataaatctttacatctgtaatcatggaatgatccgtaatgctctgcaccaggtggaacaggctgttcatccgggaggtggagatatccatggtattggcttctgctctgggtacctggaagagatcctgtatcaacatggcgctggtgatggtatcagaggcgtgtcccacatgggaaatgaggttctcaatggaggtcacggtctgggcggacagggcctgctccgagcggatgctgtcatccatgacaatgccgtaaatgcgcaggtataggaagcctgacagtacggcggtgggcagcagtaccaggatgatgtgggatatgacaagctttgtcttaagacgcatgtcataggtataatgatgaatcagcttagaaaacggatttttcatgcaagcattttctccctgtattcagaaggggacaggcccacgattttcttaaaggtcttgctgtagtaattgccgtcgctgtatcctaccttggatgaaatgtcggcaatcttgtacctgggatcgcttaagaactgcttggacatcttgatgcggtaatccgtcagatactggtttaaggtctggcctgtctcatttttaaaaatcgtacatacgtagctggacgaaaggtggacgtactcactgacatccggcacggaaagggaggggaccgcatagttcttatggatatattccttaatctggaataccaccgggtttcccacactgtttccccgcaggcgctcaaagaacaggcgcacctttgccgccagcaggtcattgagctccctcaggatggtgcagttcatgaccccttcccagatggattcagactccagtccttccttctgccacagggagatatagcttcccaggccgtgttcgtccagcttgctgaaatacttataatagatatccttcacctggctggggccaatcatgtcgtttggcacaaaggattcatacagccgtctgacgatgtccagggcttcctcctcctgcttttcggacagggccatggaaaattccagaaggaggtctgccggcggccggaatacggctgtttccatgttgtgggtcagtatgaacccgtaatcatggaaaaatgcctccttcagatgttcactggcttcctggtaagagatatgcgcgcggtccataccgcttacaaccgggcccatggaaatgaaaaaagggcatatcttaataagcttttgggccaggagtccggcgcagtcgtacagggtcttgtccgagggacgctccggggagtgaaggaaaacaatgatgcggtggtcacctcttaggacatatgcctgggatatgcccatagatgtgagatggtccgcagaataatccctgattccgtccatctgttcctccggcagcatggataagggggtgacacagtcaatgataatgcagcagaagcaggtggtatgggtgattgaaaggcccaggccggctgcgagctgtcctgcctttataagactctcctcacctggctgggacagtaaaaggctcagatggcccagctgttccttctcctggattcttgctgccgcctggctcattttctcgtttatgctgctctccaccgcctcccgtatggctgtggccagttcctccatgtcaaggggcttttccacataccccagggccttcagcttgatggcggcttttaagtattccttgtctgaataagcgctcataaagataatggtggctgcgggcagctcctttaatatccgttccgccatctgaaccccgttcatcctgggcatccgcacgtccgtgagcacaatatccggttcctcctcaagggccgtcttaaggccgtgtatgccgtcgtcctccagcagcacctggctgattccaaggctctccaggttcaggctgtcccggattccctcacgggtcagtttctcatcatcaacaatcagaagtttcatctattatcatccatccttttcaaaaggcagtgatttgtatacaataatcaataccgatacaactattgtatcaagaaatcataaatttgcaacggaaatggacaaaatacgacattaggtatatactgggaaaaaacagcaggaaggcgggaaccgcagggtgaaagggaaaaattgggcttggatagcaggggcggccatgatggcaggagtgttgttcctgttttcctgccaggacagtcagtttaacaggggaaaatacgctatcatcatgaaatccaagaacaactggtacaatgagctggccagcgagggctttaaacaggcggtggaggatgcaggcaagaactgtattgtcctgtatcccgaccatccctctgcacaggaacagatacatctgatacagaaccttaccgacgaaaaggtggaggccatagcagtggctgccaacgatgaatatgccctgactccggttctaacccaggccagggaaaagggaatctccgtcatcacgctggatgcggatgtggaggcgggaagccgcagtatttacataagcccggtggatgccagagagctggggaaagaactggtcagggaggtggaccgtatatgcggccacagcggccagtggggtatcctgtcggcgggaagccgttccgccaatcagaacgagtggatatatatgatgaagcaggagctccagaatcttgagtactgcggcctgcgtctggtggacattgcttacggggaaggggaatatgaaaaggcggctgaaaaggcggagctgatgctggagacttatcctgacctgaaggtaatgtgctgcctgtccacggaaggaatcaaggcggcggctgatgtggtgaaggagcggggccaggcgtctgaggtaaaggtcatcggcctgggacttccggaccagatggaggaatatgtgggcagcgatcctgaggacgtgtgtccggtgctgtacatatggagtcccatggacctgggacgggtggcagggtatgtgtgcctggagctgtctgagggctccattgaggacagggcggaccaggaactgctgctgggaggcaggatataccccgtggactacggtcaggacggcgggctggaggtcatagccggcgagcccataagggtggattcggaaaatattggttactggaaggaccagatttagaagatataagtataatatttgaaaatattccatgagatagaaaaatattaccatggaaatcccttacctgaacgtggtattataaaaatgtcggaagacaaacaaaagataacgttagagggcattgtcagatgcggacttaccagtaagtaccatcccccaagtatctgacagtgatactaaaaaaataccatacggaggtgaacaacatgaaacgtatccttgttaagtttgaccaggcagaccagattattaattttgtaagaatcatgaaccgttttgagtgtgatgcagatgtgaaatgcggcagccgtatggttgatgcaaagtctattgtaggtgtattatcactggcaaagtccaaaaccgtagagctgattcttcacacagatgactgcgaccagctgatggaggaaatcgctccgtttgcagcatagtcagacaacagatacactttccttgatttctacatgaatcatgaaccgggacagcagcaggtgtgctgtggcccggttcttttttgtattatagggtgcgcccagctaagggcttgaaatttagtgggtgagagtcccacggtgtaaggtacaagctataccgcatcaagcgagtcttgggtggacagcagcgatgttgcctgctaagcgtagacagcgggattgcagggcatagccgtatatagcttcgatattaaaatgaaattgggaaggcagaagtgctcctatacactgaaagcaacacagctgtagtcgttaagagcgagaatgcagctgcttccccggggttttaaggctggtcatgtaatcaaggattttaagtcaactggggaggtctgccaggctccgggcaggttgcgtaagcccggtatacggaacaacggtagaaaggagaaccgtaaatggccggcagaagtcggatggccgaatagtacacagcaaaaaaaagcggtggaagtcgagagagacctgtcctcgcaggtcagccatgcaaagtcatatcaaagaggaaacataatctgtacgcagagacaggagaaattatggaaacgaaattggcgagaatatcacagttgtcaagcgaacatccggaaatggtatttacgtccatagggcatctgattaataaagagttactgaaagaatgccacaaggagatggatggaaagaaagcggtaggaattgatggaattaccaaagaggactacgaagtaaatttggaagaaaacttagatgaattaatcaggaaaatgaagaagaaggcatacaagcccaaaccggcaaaacgggtggaaataccaaaagaaaatggaaagacccgcccgctcagtatatcctgctatgaggataagttagtacaggaagcgctaaggcgaatactggaagcagtgttcgagccccatttctacgaagaaatgatgggattccgcccaggaaggaactgccacatggcattaaggagactgaatgggatgctggaaagggaaaagacgaattgggtgctggacgcagacattaaagggtttttcgaccatttagaccatgaatggatagtaaagttcatagaatcgcggataaaagacccgaccattatcagactggtaagacggatgctgaaagcgggaatcatgagagatttcagatatgaggagacagaagaaggggcaggccaaggctcggactgctccccggtcatagccaatatatatatgcactatgtgctgatatggtggttcagggagaaagtacagccagtgatgagaggatatgcggggctggtagtctatgcggatgattttgtgggatgcttccaatataaatcagatgcagaaatattttatgaacacttaaagcgcagaatgaagtactttggactagaattggaggaaagcaagacaaggttgattgaatttggccgattcgcagaaagtaaccggaaagaccggggaaaagggaggccggagacgttcacattcctgggattcacgcattactgttcgcatggcaggacgggaaagttcagagtaaagaggaaaaccagtaagaaaaagcttgcaaagaaaagcagggaaataaacgccatgataagagacatgaggtttctggagataaacaggatagtaaagaaactaaatgaagtactgactggttattatcattattacggaattactgacaattcaagaagcctgaactcattcaataatgtggtatggtttaggttattctactggctgaacagaagaagtcagagaaggagctatacgaaggaaggatataaggaactaatgagacagttcccgcttgtgcggccacgtatttatgtcagtatatacggataactgtagatgtattagctttgcagggagccggatgcgggaaagctgcatgtccggttctgagaggggtaagccctgtaaggggcttacctacttaccaaagtccttgctgaaataaagttatgtaaactaatgattctgccaaaggagggtatagaaaacagacggtgatttagaacaggtcgatatagaacccttcttcccatccatcatcgtcgaggtcgtcatcttcagttaaaaagtaatgcatatccaataaatcagaatcggtcatatttctgaccagtttgggtgtcattccttctggaggatttttgatgtatttttgtctgagttcatccacatatctttgattcatttgcaactgcctcccatctgtaataaatgtagtatgaagcagatgggagagaaagtcaagcagagcgggaccggggataaaggccatgccttatccttgtccttttgtataattcatccagaggaacccgttcatgtttatggtacagctctagaaagaccatttcatgtctgcagtttgggcattgcagggggtcgtaccccatggtaagaaggaaaagcttacgccaggtgttgaaatcgaggagaatcctgtgtttggattttgggactgctttatggagctgattgtcaatctcccggtgtctggcataaagcccatagtaccgggtcatcttgaagtttttttcaggtatatgcagaatgagcagcttaatgaaatcaatggcgggaagagtcttttttacaaaagagttgtcttcatgcttattgtaatggaaagtcaccatctccccatcgtaggaatcaatcctggaaagagcaatgacagggcggccaagataacggctgacatatttaataatggattttgggtcgcaaagattgggcttggcataaacgtagaatccatttctgtccctatggtaaacggcggctttcatctttttaaaagagggaccgatgcgtttttccagtttatttaacaaaacagtctgaaaggatttacggaggtaggaataattgaaatatgtgaccttgcgccagacaccatcatcagaaaacccgccttcggtaaggagacagtggatgtgtggattccaaccgggagggcgaccgaaggtatgaaggacacagataaacccagggacaaagtttttggatttgttcagggagaaaaaatattctttgatgacatcagaaacagcctcgaaaaggcagttaagcagagtgcggtcttcgaggaaaaagcggcggagggattcgtcaatggtgaagacgagatggcgatgggtacactgtattaatttaaaagacatagcggtagacctgtcattggaatacttagcgccgcaggaggggcaaaacttggagtggcagcggaaaggaacgaacttgaggttaccgcaatggggacagccatacatggcgccaccataagaaggatccccgcagttaatgaccttatcaatgttttccatgacgacaggtctgggttttatatcgtattcaatgatttcgtaatagtctctgagcatcttctgaatcacattcatgagattattatggaataaaatgacgcaaaaaacaagccctaattcccctcatgaatgaggggctaggggagttgaggcgccgaaggcacttttttgttaacttatcatagaagatctcaatttacagactttttttcataccctccaatcatctattttgatgattttgcgacactctcaactgccctctttttacgttcaattgcttataccaactcctccaaaagggaacttccaatggttccttccggcatacccactccaaaattcccggcaatggtcgctcccaccgctccaaaggaatctgtctctgccagcttgccggctcctttaaactgtttagaataaatcagaagcggaacctgctccctggtgtggtccgtaccagaataggtgggatcattgccatggtcggccgtaatcatcagaagatcctcctcacccagtccgtccagcgcttctcccagcttctcgtcaaaacgctccacttcctttgcgtacccttccggattccttcgatgtccccacagggcatcgaaatccaccagattgataaagcacagtccctcaaaatcctcattcttaattatatccacggtctgttccatgccgtgaaccgaacttttggacttgtatgcctttgtgattccctctccgtcaaaaatatcgcggatcttgcccacggagatcacctcaaatccatgatcctttaacgcgtccagggctgtcctgccggtaggcttaagcgcatagtcatggcggttgctggtccgtttgaactcgccttttttcctgcctacatatggtctggctatcacacggcccactctccattcatccttcatggtcagctcacgcgcgatctcgcagcaccggtacaactcatccagtccgaatgtctcctcattgccgcagatctgcagcacggaatccgccgatgtatacacaatcatatggcccgtagcgatctcttcctccgccagctcatccaggatctcagtcccgctggagcttttatttccgatcaccttgtgtccggtacgcttttccagctcatcgatgagttctttgggaaagcccgtctcagtaaatgttacaaacggcttcactgtcttgatccccatcagctcccagtggcccgtcatggtatccttgccgcagctctcctcattcataaccgtataatatcccacaggctgtgttacagcatccacgccctttaaggggcgcaggttggcaagtccaaggcgcctaaggttgggaatctcccaatgatccacactgtccgcaatatgccccatggtatcagcgccctgatctccatagtcctttgcgtcctttccgtttccagcgccaaatgaatccactacaatcacaaatattcgcttaaatttccccattttgttctcctatccaacaatccaattactctgccatcatagccgccgtcttcagcgcaaccttcatcatgctgccgaatgcctcctggcgttcctccacggtggccttttccccggttgtaaaggagtcggatatagtcagcaggcaggcagcctttttccccagtacctttgcgttgtggaacagggcaaaactctccatctccacgcactcactgccgtgcttcgcataaatctcctgaaagctgtccattcccggctcactgtaaaaaacgtcactggagtggatcttagccggtatcacttcgattcctgatacctttcccgcttccagaatcgcctggttcagctccggatccggatattttatatctgcctcatccccgttctgggtcctgctaaagctggattcactccagcactcctctgccagaaccacatcgtacagtttaagcctctcgctgtaagcgcctgcggatccgatgcggatgatccgttccaccccgtactgtgagaacagctcataggaataaataccgatactgggcatccccattccgctggccataacagtcacttcttttccctcaaattttcctgtaaacgcatagatattgcgcaccttgctcactaattttacgtcagtcagccaattctttgcgataaattccgcccgtaacggatctcccggcatcaatacggttttggcaatctcccctggcattgcgcttatgtgtggtgttcccataataaataacctcctctttctcttgcaattcatatgtttttattttaaactcaatatatggaattaaaaatgccaaatgtcactttttaagataaatgaggaattttttatgatatgggaacaaatattggaggactgtaaacaatacgactgctatccctccgtcaaatccttcttttccacctgcccgcccctgatccgcaactacctgtccgtctgcgcgtttctcccggggcagatcctcaccaaagcgggcaccccatgtagcacggtctatatcctgatctccggccgtctccagaccatcgaggagaaggccggagagatgccctacagtttttttgacctggtaccatttgatgttctgggggactacgagctattttccgaggacgcggaaagctttgtgaccgttcaggtgcgggagccttccgtatgtcttaccctgcccgcaaggttctatctacagtggatcagcacggacagcaccgccctgttcttccgcacaaagctgcttatgaaacagctctcccgtcagctcatctccaaccgccgttttctgcttatgacctatgaagaacgctgcatgtacatcatctgccaagaagcccgcagatccctcatggccaatggttcctgccgcttcaagctgaaccgtgagcttctggccgccaaaaccggctgctccctgcgcaccatccaccgtctgatgaaggagctggaggaaaaggaactgatcggactgaccggaggcagggtaaatgttacccacgggcagttaacccggctgttaaagctgctggacgcgcctctgtaaggtcacgtatcacaaaaaatatccccatccggcaaacaacatagaccggatggggacatatggttgggccgttgcaaaagtagattaaccatctactggagcaatggctccatttttgtactcaaaaacaaaaaaacggactcctaagagtccgccatccgtggtataataaagtatgtcaagtacaaaagaataccacaaagattataccgaacttgggcgaacttatcaacaggttttgccattaagtttggaagggttgattccgaatgatgattctgtccgactgctgagacacgaattggaggatttcgattacactttgctgtatcaggcttactctgccaaaggcagaaatcctgcagtggacccaaagatcatgttcaagattctgccctatgcctattcccagaccatttattcttccagaaagattgaagcggcctgccgcagagataacaactttatgtggctgctggccggtcagaaggccaccgatcacagtaccattgcgcggtttcgtactggatttttggctgcggcctgtgaggacctgtttttccaaatggtccgccggctggcagtcatgggagaattgtcaaaagaaatggtatttattgatggcacaaagctggaagtttttgccaacaaatatacctttgtctggaaaaaatcggttggccggtgggaagaaaccatgtttgataaaatcgtagcggcggtagaactggtaaaccaggagtatatcaagtcctttacggtaacaagagaaagccgggcatccgatttgcaggagattgtcgactttttagaaaagactgccacagagcatgggattgcattcgtacatggacgtggaaaacgaaaaacaatccaacaacgttattacgagctgttccggaggtttcttgaccgtcagctgctctatgacctgcaccatacccgttttgggaatcgcaacagctactccaaaaccgatgcggaagcaacgtttatgcatatgaaggatgaccatatgaggaacgcccagctcaaacccggttataacgtcctgtggatgtatggggaccccaccacccctatgatgtggcggacccattttatggcagagtagacgccggaaaactggccgaacatccaagcttttcagaaaagtatgaaaataaaccgtccaattacgcctactctaaacagttttggcactgtatggatggaatggactggacgcagatgaaccaggtgctggccagaagctatgaacatgcaatgatggtggatgatgccctgggacgtgtggttaaaaagctggaggacctgtctctgtctgaaaatactctgattatcctgacagcggatcatggtgatattgtaagcgcgcatggaggtttatttaataaagagacgcttatggttgaggaaaccatgaaaataccgttggtaatgcggtgggataatctatcccctgcaaagagatatgcggagattttgcgtcgaatctggatttgccggctactatcctggccgcggcagacgttaagccggaatacgcgatggatggtgtcaatttgctcggcggacagtcgcgtgaacatttgatatgtgaaacctttggctgttataaaagggaatttcagcacagaatgcttagatggggcaactataagtatattgcccatgagaacgattttgatgaattttataatttgaaaacagatccgtttgaactgcataatctgattcacgaaacagaatattgcagacagcttgaggaggcaaaagccaggatgctggatacggcgaaacaatatggggacagctttacagtgacgtgatatctctgatgcaggaattatcagcatattatgccgttgacgcttcgcgaaatctggtgtataattttgataaataatttatcaatatttaccatcggggagagggcaaagtgaaagtaaaggtaaaggatattgcgaaggcggcaggggtatcgccaagtacggtttctcttgtgttgaatgaccgtccgtccagaattgcagaggatacgaaagagcatatcctgcgcactgcgaaagagatgcagtttcggatggaatccggcgttgatttcaccgagttaaaaaaagtgaagacgtttggtatgattgtgccggatgagatgaattctttttatcacagaatggctgaggaaactgcaaagcacgcgtttttgcatggatatacggttttccaatgctatacaaatgatgatatccagtgtttttatacggctcttgaagggctgatggctaaaaatgtggacggtctgattattattccgccaagaaccatggataaggagaacgtcaagctgttaaagtcgctgcagaaaaatgggattcccatggtcctgcttgaccgggcggcgtatacggtgttctgcgattttgttacggcggataacaaatacggaggacgcattgcgacggattatctgatcaggcatggacatacaagaatcgggtgtatggtgggggatgccaatgtatatacatcgagaaaacgcgtggacggatataaggaggcgctggcggcggcaaagattccttttgacagggagattgtatattatggaaattttgatattgagacgggcagggcaggagcggccgtactgttggagaagggcgtgaccgctgtggtggctggaaacgatctgatggcatacggagtatatatttatgcacgggaacaccgggtctccataccggaagaattatcgcttatcggctatgataatacgcggcagtgtatattgatggatgttccgctgaccagcgtggaccagaatacggatatgatggcttcaaaggtggttgagttgttaatccgtcggattgaggaaccgctggaggatgagcaggagccggcgcggaactactatttcacgccctatgtggtggagcgctgttctgtggcgggaattgatgggaaaaaagaataaaagttttatagagagccggaaatggggaatgatacctgtttccggctttttgagtatgttaaaacaaaatacggctaaaaaatttatcaaatatttttcgtgaaatgagttggatataatgctcgataaatttataataaagacagaaaaaatagaggaataccccaaaaatagatggatgaaaataaatgattccgactttttattttacgttgacaattttagataaaatgttataataaaaatacaaaaatatttatcataaatttatcaaacgttagagataaccgttaaccaattagaaaaaaggagaaaaggtaaatgaaaaaaagattttttgcggcagctttatcaattgccatggtaggaacgcttttatcaggatgcggtatatccacaagctcgtcagagagtgacgcgccgggcgcggccgttcaaaatgagaaggcggatgaagaagggccggatcttaaaaatcgcgagcagcttacattctggttttggggagcggagccgtatgcacaggaagcgatgcagaaatatgtggcggataaatataacagttcccaggataagtatgaacttgccctggagttccgcccttcggtggatacagatatgtcaacggcgcttgcggctaatcaggggcctgacattgtatacggttccgggccgtcctttgttatgccgcttgtggcggcagggaagctggaacccctggatacatattccgaacagtatggatggaaagaccgtattttggagccgtattatgaatcgggcacagtgaatggaacactttacagtctgaccagcggaatcagcaccatcggtgtattttacaataaaaaggttctggcggaccacggatgggaggtgccgcagaccatcggcgacatggaaaaaattatggatgaggcgctggcagaggggatgtatgcgtccgtgaccggcaataaagcatggaagccggtgaatgagaactacgcgtccctgttcctcacccacatagccgggccggaagccgtttacagatgcctgaagggggagcagcagtggaacagcccggaaatcacagcggcgattgagaaatccaaggaatggtgggataaggattacttcgctggggacgattacatcaatctgaactacagtgaatcattacagctcctggcggatgagaagtctccgttttttatcggtccatccattgcgtaccagtgggcggcctccttctttacaggggatatggcggagaacctgggctttataccatttcctgcaactgaaacagttccggataagacatatacaatcggaacctcctgtacgttgtcaattaatgccaataccagccaggagcgcaaggacgaggcggcaaaggtcattgatatgatgcttcagccggagtttatgcaggagataacagctgtctggcccggttattggggaacgccgttaaaggatctttccgtccttgatacaacggacatgggctacctgtcaaaatcgtttgttgacatgatccgcgacgtgtcggaggcagttaacaatggtaatttcggatactatgacaacgtgtttttccctgcggccacgcagcaggatatggtcaatatcgaagatgtatggtatgacacgatttccgtatctgactatctggataaagtagataaggattttaaagaggaatttgataagggacttgtaccgcccataccagctccggccatgaattgatataaaactgacaggaggaatactttatgcggcaaagaaaaatgaactggaattatattctggttgccccggccctgctaatcagtatgtcagtcatattaattcccgggcttatgaccattctctactcgtttacagattacaatggcatttcgcagaacttcaattttgtaggatttaaaaatttcattgagctttttcatgacaggattttctttatcgcaatccgcaacaattttatctggactgttttatttattacaatacctgtatttatcgggatgctggcagccatgctccttctctccagaacaaagaccagaagcatttaccaggtggcgtttctgattccttatgtactggctcctgccgtcaatgccatgctctggctgaacattatattcagccctgtggttggaatcatagcgttccttaaaaattttggtatcgattttggttctccccttgccagcatgaaaagcgctatttttgcctgcgcaagtgtggatatatggcattattggagctatctgaccgttatttatctggcggccctgcggcagacacccatggaccaggtggaggcggccaggattgacggatgcaacggatggcagttattccgttacatttaccttcccaatatcaggtcaaccgtaaatctgatgtttgtgatgattgtcattggctcatttctggcatttgactatattaagctgctcaccgccggaggccccgcgcattccacggaggttctcggcacctatgcgtattcctttgctttcagcgagatgaaggtaggaaaagcagcggcagtcggtctttttatgagtttctttggtttaatcgcgtctttggtttataccaggatgagccgcaaagaaaccatggattaggaggagaatatgggagcgtcttcaataaagaaaaaaatcctggtcaataccatgattcatctggttttattcctgcttttgattatctgcctgtttcccattgtgcttgtggtaatcaacagttttaagacgaatgcggagattgtaaggaatccgctttcaatccccaaggttctgcatctggaaaactttatccaggcatggaccacgggaaagttcgcgcatgggtttatcaacagcgtgaagctgagtgcctgtacaatccttattgtgctgttctgttccactcttgcgggctatgttttatccgggaacagaatcaagggaaacggaggggtgcttacatattttatgatggctatgacagtgcccatacagttgtttttgttccccttatactatgcttatgccaaaatggggcttattggcaatatcccggcaacgagcctgattctggccgccatgttcatgcccctgtcagtatttctgatgcgtacattttttgtcaatgtgccgaaggaactggaggagtccgccagaattgacggcgccaatacggcgcaggtcatctggcatgtgctgcggcccgtggtatcaccgggactgattacggtcagcattttaatcggcctgcagtcatggaatgaatacctaatttccagcacgttcctgcagggggcgaagaactttaccgctacccttggctttttatccatgaacggggcatacggctcgaatatgtctattctcatggcggcatcagttatcctgattgcgccgattattatctttttcctgtgcgcgcagaagtattttgttgacggcatggtaagcggtgcggtgaagggatagagcgtgtttggacactcattcccgcattctgcgtggccgggttccgccggggttggaattaatttataatttggaggattttttgtgaaaaatttggaacggtttaaaaatgatatttatgccggcgttcttggaaaaatcattggggtttatcttggaagaccggtggaggggtggacctacgaggcaatcagggatacctttggggaaatctattattacaaaaaccataagacaggagctccgcttattgtgccggatgacgatatctccggaaccttcgcgttttttaggagcctggaggataataaattttctcctgatattactgcgggtaagattggggattcctggctgaactacatcattgaaaatgagacaatcctctggtggggcggtctgtcgcggagcacggagcatactgcatacctgagacttaagaatgggattcgtgcgcccaggagtggttccattgagctgaacggccggagcatggcggaacagattggatcggaaatttttatcgatacgtgggccatggctaatccgggaaatccggagcgcgcagcaaggatggcgagggaagcggcaagcgtgagccatgacgggattgcaatagatgcggctgtttatctggcagtgatggaatccatggcttttatagaaaaagataatgataagttgttggatgaagggcttaggtatgttgaaaaccgtgagtttaagaatctggtcggggaacttaggaagcagtgtgccatggcgtctgactggaggacagtcagacagtggattgcggattaccatggctatgaaaagtatccgggcaactgccctatggtgacaaaccatctgacccttttaatggcgtttattatgggcggggatgacttcaacaaggcatgtatgattgcgtgcagttccggctgggatacggactgcaattccggtaatgtgggatgcttgaacgggataaggcttgggcttgatggatttaagcgcggtactgacctgcggtctgctgtctcggaccgcctgtatgtggtgaccagcgacggcggttcctgcatatcggatgccgttctggaaacgagaaaaattctgaaagctgcctgccgtctggagtatgagccggtggatttcccggaggccaggctggcgtttgaatacccgggttctgtccagggtgtggtgccttatgataaggatacggaggagcaggtgctctgtggtattgacaatccgtatgaggagacaggggaatttggctgtaggctttcctaccgcggccttggcccgggcgtacacgcttccgcctgcattgatacatttattgacctccagccaaaagggaaggagggaaccagctattttgatgtcctctgttcgccgtccctttacagcggccaggaagtaaatgctgtcatcaaagccagggaggaagagaacccgtctttctttttctttatcgagtactttaatgagacggaccggctggaaaccatatacagtggcgcgtttatactgaaaaagggagataactgcctgaaatggaaggttccggatgtgggaggccatgccatcttccgtctggggttatctttaagaaacaaaaaacagaggatggatggggcagtggtcataaaaacattggactggtccaatgtgccggtttgctacagtctgggtcggtctatggaaatgactccttcattgaccccatggaccacgaccacggcctggctgaaaacgtttgtatcgtcagcggaccacttctgcccggactatacaacgacgttttccatatcacacgccgcaggtaacggcgtggttaccacaggaaccatggactgggatgattattccgtcaagtccgtcataacattttcgcagcaggaccaggccgggctggtggcacgggccaaagggcacagacggtattacggtgcggtattatcaaagggaaatgcaatcatttaccgccagtgtgatgaacagagatatgtgatagcaaaagcaggtatttgttttacgattgatgagacacatgaactggagttttcccttgagggcacaaaactttccctacgggttgacggaaaaccggcggtggaggggagggacgactgttacctgtgcggcggagccggttttgtagtggattcaggtgctatcctggcagatggatttgaagtaagaagaatcgggaggaattaatcgtgagtattagtcgatataggaatcagatatacgcgggagtgctgggcaaaatcattggcgtctacctggggcgtccggtagagggatggagctatcataaaatcagggaaacatttgatgaaatcaaatactatgtccacgaaaaagcaggggtaccgctgattgtagcggatgatgatatttcgggaacattcgcgtttttccgggcgctggaggacaatgggtatgacagggaacttcccgccaaggcgttcggcgatacatggcttaactatatcatagaaaacaaaacgatactgtggtggggcgggctgggaaggtctacggaacatacggcgttcctgaatctgaaaaatggtatggatgcgcctgaaagcggatcccttaagacgaacggaaccacattggcggagcagattggggcgcagatttttattgacgccattgctatggcgtgtccggatgatccggatctggcggtcagcctggtgaggaaggcagccagcgtcagccatgatgggattgcccttgaggcggcctgccatcttgctgcccttgaggccatggcatttacggagaagaatgtagatatacttttggaccgcgctggcgcgtatgtacagaacccaattcttaaggaaatgattgcggatgtgcgcggcatttgcagaaaggaatctgactggaggaaggtacgggagtatctggatcctaaatatggttatgaggtattcccggggtgctgccatatgataccgaaccatgccatggtgattgcgtccatcttattgggaggagatgactttcagaaatccatatccatcgcgtcttcagcggcgtgggatacggactgcaacgctggcaacgtgggcgcgtttaacggaatacgcctgggccttgagggaatgaacgcgggcgccgatttcaggacgccggtggcggacctcatgtatgtggttacttccgatggcggctctgttgtgacagatgcggtacttgagagtaaaaagattataaaagcagcagccatgctgcacaacgaagaaatccagcagacccatgagcggtatacctttgaatttccaggctctctgcagggatttgccccctgtggttttgaccatggcagccaggcggaggtgacgctttccaattataacgaggtatccggggaaaatggcctgctgattcattgccgtcatctggcggacggcgtgacggcggatgtgtctacccagacatttattgatttttccaagctggcccggaatttttcaacagtggcttcgcccaccctttattcgtcacaacgggtagtgacaaccgcgggagtgctgtctgacggggaggtcacaatccgcccatacatcctttattatgatattgataaccagattcaggtaatgtatggggagccgatccggctgcggggaaaagggacctttgaatgggtggttccggatacaaagggcatgtccatttttaaattgggttacgagattggaagcaggaaacggtttgatggggatgtggtgatttacagcattgactggaagggagcgcccagggattttgcgcagcgaggcatgctgatgacatccatatggaacacgaatcccctctggcttgcgggctttgcaagttcggccgtgcagtttgcggcagattttaagcatacatattgcgtatcaaatgtggagaaggggggcgttgtgaccattggaagcagggagtgggaggattatacagtttccagcacggtctattacagtcttcataaggagggcggattggtccttagaagcaagggacataagcgctactatggggcggcgctcatggattacagcagggcggttgtctatgtccagaaagaccgggaacgtgtaatcctggcagaggttccatatgcatatcaggaggataccggctatgacttgacattcgcggcccacaaggacaagctggagttttatgtgaaccggtcaaaacttattgaagtgcaggatggaacctatgaaaatggaggggctggttttaccatatcggaagggactatgacgtgtgacagtttcattgtgtcagagtgagaagagggggacggataaggatatggattttataatagcatccacttctgtgacagacgaaatccggtttgcggataaaaagacagtgaagaaggttgcgggcggcgctggaatctacgcgttatgcggaatcaagctgtggagcgacagcgttatgccggttacgggagtgggaagggattatggctctctgtatggcgcgtggtacaggaagaatggcataccaatggatggacttattgtgaaaagtgataagaccccatataatgtcatccagtattttgaagatggagagcgcagtgagacgcccttatacggtccggaccattataaacaaatagaagtcaccccggcggagctggaacagtattttcaaacggccaggggaatctatatatttaaaaacagcagtcatgatttttggcagcagacagtacctatgctgaaaaaacggagagcgtctgtcatgtgggagattgccaatgattccacttgtcctgaatgcctggaggaggtacgcctgattgcggagaatgtagatatcttttctattaatttaaccgagagctgccgcctctttggcgtcggcacattggaagaagtaatagagcggttctgtcagtggaaaaccggcatggtctttttgcggcaggggtacagaggagcggtgatgataaccccaaatgaggtgtcgtttgtgccgtcggtgaagaatgtggatgtagtggacccaaccggaggcggcaacagttcatcgggtgcggtactgtatggctattgcagtggttacagccccagggaatgcgggatgatggggagcattgcggccgctatgtgcctggaacagttcggcgtaccggaacggattgatgagggcaggcggatggcggcgcaccgtctgctgcgtgaaatgaaaggcggggatcaggatgagaagtgaaaccataaggcaaaaaccatccatcagaagaatccatgagctatatgaatattataagaatgtaccggagcgcggccttatgataaaaggccgtccggcgctgacgcagattgaccatgagaaagtgggagattttgttctgattacggtccgcgaccctctgtgcgcttatgatgtggaccctgcgaaaaagattgcggacaggctggaacatgccgagctgattggcaattctggaatgtttacttcatacagcggaatctataagggggcaaacattactgtggtcagcggaggcagcggttcgccggagatggaactgattttatatgattttatggaatatacggacgccgggacattcctccgtgtgggaggctccggcgggattggcgacgaggtaaagccgggtgatgtggtaatcgccagcggcgtggtgcgcgaagaagccatgacaaaggcatatataccggcgggatacccggcagtcagccattatgaggtggtgggcgccatggtggaggcggcagaccaattggaggccccttatcacgtaggagtgacgctgtctgtggacagtgatttcgttggaggcggaagaccgggagtgggcggttacatgcagccatggaatattgaaatagcgggaatctataaccgggccggggttctgaacggggacagggagtcagccgctattgttaccctttctgcgctgttcggccgcaggggcggttctatctgttcggttgcggataacctgtgtacaggggagacgtttgaggcgggaagcggccataattttgccatcgatattgccctggaagggtgcgccttattggaccgcagagataaagccaagatagtgaaaagtaaaggagcagagtgagatgagttatagtgaatgtttagcggagcagtattccaatcccatgagccggcaggtattcagccttccatcgcttatacgagaccagtacgaggacctggagccaaaaaccaggaaggttctttcatttcaggagattttcaatatacagcgggtggtgctgaccggctgcggggattcctatgccgcatgccttgcaacaaagcatgtatttgagatgctgaccgggatacaggcagaggtagtgacagcccttgacctgggccggtattacagtgaacgccatctgggggtggactgccagaatcccatggtgatcgcagtcagcaattcaggacgcgtggccagggttacggaagcggtaaggcgggcaaagcttcatgactgctttgtgctggggattacgggcaatatggacgcgcctctggcccagggttcagaaaaagtacttaagctggacatcccgccttttgaaagcgctccgggtacgcgcagctacctggtcagcgtaatggctcttttgctgctggctgttcgcattggcgaggtaaaaggcacatataccatggaccaggccatggattaccggtatgacataagggaacaggggaatctgcttgaggcgctgctccctgaaatggcagaaaaatgcgcggagatttcggaaacgtggaaaagcttttcctgttttgattatgtgggtgcgggatttgactatgcggccgcctggtttgggcaggccaaaatgcttgaggctgccggaaaagtttcgatgcacataaattcagaggagtggtttcacctgaactgttttgcaaaggatccggaacagataggaaccataatcgtagctaattcaacaaaccctggtcttggacggaccatggatgtgataaagtacgccagggaaatgggaaggccagtggcggttgtgacggacaaaacggcagaatccctgggaaccggcaaagcagactgtatcacggtgccgtctcccaggtatccaatcagtatgccgctgacccagttcatacccatgtgccttatagcgggctatatttccagcatgctgggagaatcatatgggcgtgggtgtgaaggaccgtggagtttctgtgaaaatggacattgtgttcaggagaatgagataattgtttcatagcaggaggaaaacatgttaaaaaagtttaagcttaaaacaaaatacaatgaggtctgtgatatcactgagcaggtaaaaaagaccgtggaggaaagcggcgtaaaagagggaacgtgtcttgtctataatcctcattccaccgccggattagccgtgttctctccgtgggatcccgatggttttattgatttagatgaagagatacgcaggctggttcccacccggattgattttaagcatcagcacgataccccccaggacgccgccggacatgttaaatccgccttgattggcatctctggtaactttatcatccatgaggggaaattgatgacaggaggctcccaggccatctattttctggaatttgacgggccaagaaacagagagttttttgtgaagatacaggcagataactgatttgcgcccacaggcggagttttaataacagagaggacaatgaatgatggataagaaaaaaataatcctggattgtgatccgggtatggatgattcaatggcaattatcatggcttgtaaatcggacgcgctggaggtaaaagcaatcacaaccgtgagcggtaattattcagtggatgtgaccagcaaaaacgcattaaaggtattggaattaatcgggcgtactgatataccggtaggtaaaggaatgccggaaccaatggtaagaaaaagccccaaggacccgtttacccacggaacggatggccaggcggagaatcatcttccggatccagccacgcccctatgcgggcgccacgcagtggagctgattattgatacggtgaaagcgaatcctggtgaagtgtatattctttgtaccggtcccatgagcaacgtggccatggcaatgaaaaaggcgccggagataaagtccatgattgccggtatttatgctatatccggtgcatttgggctgaaccgttatgcttacgcgaacgcaacaggcgatacgccgcagagcgagtggaatgtctatgttgatccggaagcggctgacattgtatacaattcaggcgttaagctggtggcgcttggccttgatgtggcaactcattttgatgtaaacctgacggacggggatattcatatgctggagcagagtgataagccggaggcaaagtttttccttcaggccatccgttttgtcaatcagagagggtttgaagcgtattgtgccgtgatagactgtatggcggtcggctatgccattgatcctgaacttgttacaacgataacaggccgcgttggaatagagacaaaggatggattgacactggggatgaccgtcctggacagcaggcatcattttgtgtgggagacgctgccggaggtggagattggcgagagcgcggactatgaagggttcttaaaacttttaatgaagcttgtactggcgtaagcaggaggattgatatgtttgaacaggagaaaatctacatagcggggccggaatgcttttataagggaggtccttctattctcaatgcgatgaggaggagggcggagagcctgggatttggcgtgacactgcccaatgagcatccgttggatatgggaaatccggaccttcagaagcgggcggacagtatttttgaggatctaaaaaatattatgaaggaaaccacggtcattatcgcggatcttgaagcgtaccgcggttcagaggcggacagcggcacaatctatgagattgggatggcttatgcggacggtctcaaatgctatggctatacaagggataagcgtccgttggcatggaaggaccagaaatacaccatgcaggacggtgtggtatatgatgaaaaaggaaagcaggcgccatataaagagctgccgtttgccccggctgtagtagggtctacaaaaatagtggaaggtgactttgacgattgtttgtccatgctgatgacggacctggaagaagagtggaaggcagaggggcgaaaggtgtctgcgtcaaggcatgaagcggaagaaagcggagaaatgcccaaagggaggaatatgccggggagagggaatataccgggccgtccaaagatttatctggctgacctgacccgctatgagaacgatgcagataatatctataagtctttgaagaatatctgcagggaaaatgggttagaagcagttactccatgtgactgggcggaggaactgccaaaagcagagagcgcgaatccctatacgagagcagcggcattgacggaaaactatcgctgcctggtgaagagctgtgacgcagtccttgctgatttgaacaattaccgcggatacgagtgcgcaaatgatgtagggtttgagtgcggtatggggtttgagatggggaaaaagctgtttgggtatatggatgatacaaggccatgtattgagaaaattcctcatctgggggaaactgctgaataccgggacatgacgggcagtaatgtagaaaattttaactatcccgccaatctgatgtttggaagctccatgaagatatataaagggaagctggaagaagtgataaagcacgtggcaaaggaactattggaatcctgcctgtgatatggttcaaagagggattgaggtgaaattggatgcaggatagtatggcagaaaacatatcagccgcatcaggtgaaacgaaggctgaactggttttgaaacatgcttccattgtaaacgtgtttacggaagaaatcgaacagggcgatattgcaattaaccagggggtgattgttggcattggcgaataccatggcgaaatcgagacggaaatggaaggcagaatcgtatgcccgggttttattgacggacatatacatttggaaagttccatggtaagccctgctgaatttgagcggattgtacttccacatggcacaacaacagtaataacggatccgcatgagattgctaatgtggcaggcgcggtggggattgattacatgctggctgtcacagaaccattggatctggatgtctttttcatgcttccgtcctgtgtgccgtccactggtcttgacgagtcaggatcagaactgacagcaagagacctgaagggctattaccagagcgggtgggtattgggattggcagaaatgatgaattcatatggtacggtccgggcggaaggggaaatactggagaaaatccaggacgccctggatatgggaaagctcattgatgggcacgccccctttctgtcaggaaaggagttaaatgcgtatatcacggccggcgttggatcggaccatgaatgtgctgtatttggggaagcagtggaaaagatgagacgcggtcagtggattatgataagggaagggacggctgctcataatctggacgccttgatgcctttatttgcggagccgtactaccgaagatccatgctggttacggatgacaagcatccgggagatttgctgcgttgcggacacattgattacattatcagggaagcggtaaaacgtggggccgatccgataaaggcaattaaaatgggaagcttacacgcggcagagtatttcggcttaaaggacaggggcgcaatagcgcctggaaagctggctgatataacggtcctgtcagatttggatacattccatgtggacagtgtatataaaaatggaaggctggccgcaaaagagggcagaagtctgaagctaaaaagtggtatgattccggagatttatggtgatacaaagaagcgcgtcttttcatccttccatatgccagttcttaaagagaaagattttcatcttcctgtcaccggccagaagcagcgcgtcatatgcctgacccctcatgaactcctgacagcagcaaaggaatatgagccattgtcatgtgagggatatgctccgggggtggataccagccgcgacatcgttaaactggcagtagtggaacgccatcataatacaggccatattggtctgggctttttagggggatacggactgaaaaaaggcgcggtggcgtcaagtatcgcgcatgactcccataatctgattatcgcaggtgtgagtgaccgtgatatggcgattgcaggaaactgcgtgcgggaaaaccagggaggactggctgtagtcctgaatggacaggtcataggaaaactcgcgctgccgattgcaggcctgatgggcaccgtgtcaatggaacagatagatgccagactcgaggaattaaagaaaaatctaagagtgatggggattccggatgatattgacccgtttatgacactggcattcgtgagccttccggtcataccggaattgaggctcaatacatatgggctgattgatgttaaccagcagaaagtaatccatgtgtttcagtgacattagaggagatacaagcagaaacggcaatcgatctttcaccccacgggcattcctatctaaatccatataatggatgtatgatgggatgcccttattgatactggctaagttttcccggatgggaaaaccgtgtacaggttaaaatgaatattgtaagccttttagaggattatctctcaaatcgtatggatgatggttatctatacctgggcagtgtatgtgatccgttcatggagctggaaagggagtataggctgacaggaaaatgtctggagctgatccgcagatacaggataccactggtaataacaacttcagctgcatcaaacgtgattctggattacattaaaattcttaaatccatggaatcgcgggttattgtagtggctgaactgtcaaggataccgtttcttgaggcaatgaatggaggcggcaggcatacagggattgatcatgcgaattaattacgcaggaatggcttggagatatgggctaccctggcgccggttcttccgggcattacagatttagattgtgtactgggcacgctggatattaagataccgctttatatagacaggctgcggtgcggtccggatgatttacaggctaatcgtatactggaatggattagcagggattatcccgggcttttctaccggtatgaggatataataaaaaaacaggattggaaatattttcaagatattttgaaacagggcagctatagcaggaggattaaaacattcccctttcaattataggataagcttacaaaaatgaaaaaaacacttgctttttttgttgaaaaagcgtatattctattatatcaatatgtattaataataatacatatatacaataaacaatgagcgggaaatatggacataatgtacattgacaattgaatatacgacagtaagttacttaagaaacaatattaataaaaatagataaggaggtacacatgaaaaagaagattttagcaactgtattggcagcggcaatggcgttttccctgacagcctgcggagggagtaagacatcatccacacaggcgggagccgcaaaatcgggagaacccgtgaccctggagcaggtggataaatcccagaccacggaattgattttttggcataaccgcgggggagccgcaggggaatgtctggaaaaaataatgattccagagtttaatgatacggtgggaaaagaaatgggaatcaaaattacgcctgtttatcaaagctcatcagatttaatcagtaaattaaaagccctgatccttgcgggcgatgtagagaacatgccggatttggttcaggtattcgcgggggataccgagtatatgagcaccgtgtcctatgttgttccggcagcggatttgattgcgcaggatgattcttttaacacagatgaattacttccccaactggttaacacatatacatacgcgggcaaattgaacagcctgccattccatgcttctaccatgacaatgtattacaacaagactgcctttgaggaagcgggacttgaccctgaggctcctcctgaaacactggcagaagtggcagaggcagctggaaagcttcttaagaaagattcttcgggagtaaaacagtacgcaatcaccatgggaatacagaacgcatatctgaatcatttcattgccggccagggagaatattcatatattggagatcatgagaacggacatgccggacgtatgaccaaggttgagtttgatacaaacgggaccatgaaaaagttcctgacagaatggaaaaaggtactcgatacaggggctgtacagactgtggatgaggggacgcaggccagggatgaatttatggcagggacaagcgctatgatgttttccagtaacagcgtgctggaaagtatggaaaatgtagcggaagaaaagggatttgagctgggggttgtgcctcttccgaaggttacggcagaggacagcggtggtgtatgcccgggtggttcctccatctatgtatttgacagaggggatggacagaagattgcaaaatcctgggtgtttatgaaaacatgggtttcagcagagtatcagtcagagtgggtgctggctacgggatgtatcccggtaaaccaaaaagcaatggatacagaaggaatgaaggaatatatagaaaagcggccggaatttaatgttgcttataatgcgctgattcaatcggatccgcatatccaggagcatctggcccccacacagcaggcatttaccactatttttaaagagaacggggaaaaatttgccgcgggtgagttatcggttgatgaatgtgtagcagccatggcagaggcctgcaatgcggctttggatgaatataaccgcgcaaaccccatagagcagtgaggaagatgtggaacagtataattatatcagagaacacacatataagctcccttccctgttgacaggacactttgagcggcttcacaagagcgtggtacaattcatgccggatgagacacttaaaagggtggaacatatcatagtaaccggttgcgggtattcttatattgccgcgttatatgccaaatgcctttttgaagagatttgccatataccggtggaggtcccgttttcaattgactgttcgcgagcaatgaatcccagcctgtttccaaaagacaaaaccatgtttatcggtatcagcaaatccggcatagttgccagggttgctgaatgcctggaacggatgcggcgacatggaatcatgaccgttgctgtgacgtcggaccggtcgtccagatgcgcggcccatggggaatacctggtgggaatcgatataccggagataaaggagagccttccactctgtaattttgcagtgacactgctcttttttctcatacttgccaagagaactgcgaatgttaagcagattggggagaaaaaggatacagcagaactttttgatacgttcatgcagatggagcggaagctaaaactgcggcttccatccatagaacaccaggttaatggctttgcggagcataccgccggttctttcctgtttgagtttgtaggttctgggagcgattatctgtctgcctggctggggcgtcagctgatgaccgggcagactggaaaaccggcacttgagtgcagtacagaggactggcttcattccaccttttttatgtgccgtccggaggagatagctacaatctttattaaaagttcctttgccaggtcagaatcacgggatctggaggtactggattatatggcatatctgaaacgccggctgtgtgtcataacggatgaggcggatggggagacgacaaatcaaaaccggattgtcctgccgcccagcggacatgtgctgcttgacccgtttacgcatatgataccaatcgccctgctggcagggaagatatgtgaactcaccggagagcagtattcaaggggattccgggacagatgggatttcagtaaaggaggattcgcaacagagcatagtaagatagaaatatattgagaaaggaagtgagtatatatgggaataaaactggttgtaaccgatattgacggaacgttaattgacagttcggagaaaattcctccccaactggctgccacagtaaaaaaatgcagggaaaacgggatccggtttgccgtatccactggaaggacaaaggaactggcggagccgattataaaagagctgggcattacagatccttgtgtcatcgcgaatggggcatgcattgtgcaagagaatcaatatcttgctgcccatgatttttccgtcctgcccattctccgttatattggtcaagccgaccgtgacggcctgactgtcacattgacagatgaaaagggggaacgggcgattcgggagacggattatgtccgctatcaccagagtatagggaaccggtttaaggaaccaattgacctggatggaaccgattggtataaagcacgtttccaaaaggttatgtttatggatgagaataagacggggaagatacataactatcaaaaggaaatggaaaattttaaggagctgtattgggtaactacttattccgacgcagcggtggagcttggcccaaagggatgcaacaaagcaaccggagtgaaggaactggccggattattaggggtctcgatggatgaaatcatggcctgcggggacttttccaatgatttggagatgatacgggtggctggggtcggagtggcggttaacaatgcaaatgatgaattaaaggaagcggcggattatgttgccaaaggttcctttgcgtatggagtgatggaagcaatagaaacatattgtttttgaaaatgggggatgaaagtgaatagtatagcagtaactccaacaaagaaaaagaaaagtatcttaaaaaaggcagagccttatttttatctgataccggctttaggactaatggtgacatttacatattttccctttgcgaaaacaattgtcacaagtacatttttgacgaatgccacaggaaaggcagtggaatttataggggcagagaattatgttaatcttttccatgacccgaccttcatccgttcaatcattaatacttttatttatacgtttattcaggtgccaattacaatagcgttagcatttttcatggcatttttggccagtaaaaaaagaaaattttccggtatctatgaactgctgtttgcatttcctatggcagtatccatgtctgtcgcagcattgatattcaagctgttattgaatccgcagattggcgcattcaaccacatatttaatttggattgcctttggtttaatggagagaatacggccatgccggccctgattttcctggggatatggcttggaatcggaatggattttctgtttttattatctgcggtaagaggcgtgtcggatgatttgattgaagcggcgagaattgacggcgcaaacctttgccatgaactgaaggatatctatttgcccatggtatctcctactattttctatttgctgtgtaccaacctggcaaccagcatgatgatgtccggacaggttatcgtattgaccaagggtggaccaaacaatgcaacctccacaattatctactatatgtataagaaagcatttgagatttataattatggttcttcctatgcggcggcaattgtgggctttacatttgcattcattatgatactgattagctttaggtttgaaaagaagggggtgtattataattgatgggagctaagaaaaagaagaaaatcctgagctgtatattgcagggggcctgtattacatggggaatcattctcgcgtctcctgtcatctactgcattctcatgtcatttatgcagccgagggaaatcctgtcctctccgcctaacctgtttccccaggagctatacctcggcaattacatagcagcgttaaagatgtcaaaaataccaaggtttatcctaaactccatctttgtatcactggtgtgcagcacggtcagaatcataacagcatcactggccgcgtattcgttttccttttttgattataaaggaaagtcactgctgttctatttggttctgggcaccttgctgataccggccgatgcaaccattgtaacgaactatatgacggtatccgggatggggcttgtaaacaattatcttggagtcatgattctgtattttgtttcagccgcaaatgtattcatgatgcggcaatatttcctgggagtctctaaggagttaaaggaagcggcagagatggacggctgtaacagctttgggttttatacccgtatccttatgcctattgcgaagcctgtgctcgcgtctgtttttatctcctccttcgtcagcacatggaatatgtatttatggcccatgctgattactacgagaaatgagatgaggactgtacaggttggaattactatgcttaactttgcggaagaagccgtttatggagccacgatggcaggtgccgttatggtgctggtgccgtcgcttctggtgtttattgtttcagagaaacagattgtccgcggtatgacggcaggttcggtaaaaggatagtcaaggaggggaagacagacatgagactgggaacatctactaccattgcttttaacaggccatatggcagaaaggaagagataccaaacgccgtgaagctatgtgcagaagcgggatacaaggttctggatatgaattttcatgactgcgcgaacttccctactcctttgcttacagacaagtggcaatggtgggttgacagcattgcggatgccgcagccaggtacggggtcgaattttcacagtcgcacctgcatttctatgaagtgttttcagtgggggatgatgaagccggtgaaaaagaagaaatcatccggcgctgtatgaaaggatccgcaatgctgggcgttaaatgggccgtgacccatgcggctaccatgtggaatgtaccggatttaagaaaaaaatccctggatgggaatatacaatattttagagaaaaactggaaatagcagaagcgttggatttacatattgccattgagaacctttgggatttgaatatatgcccgaagagaagatatacgtcaacagcggaagaactggttgaattggttgatgccctggattcagagcggattgggattgcatgggactttgaacacgcctccatcatggagcaggatcagattttggcgctcaggatgattggcagccgattgaaagccacacatgtatccgaccactatggaatccaggccgaccaccagattccatactttggcgtgacaaaatgggaagagttcctgccggtactgaaggaaattgaatacgaaggtgactttgtttatgaaacgcaccgctacacacagcacatgccggatgaactgctgcccggcgcgctgcggtttagtattgaggtgggcaattaccttctggatttaatggaccgcacaacattaaaataaggagaaaatagaatggatttagagtttgataatgcgatgagaagacaggtttatagtataccggagcttatttcacagcaatatgaggtgatggagccaagaataagggaagcccttacatttgatgaaatatattcactgcagcatattatcattacaggctgtggcgattccatggcagcggggatggctgtcagacatgcgtttgaacgtttgaccgggcttcccattgaagtgcttcctgcgatagacgtggcaagacattaccctaaaacacgcgtaggaggagcgcctaattgtccattagtgattactgtcagcaattctgggaaagtgtccagggtcaaggaagccattgagcggatgaaggaactgggcgcactgacccttggaatgacatcgggaagttccacgccgctcggctctgtatgccagaaagtaattgatacaagtattccttcttttgaaagcgctccgggcgtcaggggatatctggcctctgtagaggcattgctgctgctggcaatccgaatcggcgagatacggggaaggtatacaatggatcaggccaacctgtatcgcaaggatataaaaaaatgtccggacaggctgttggaggttttggaccgtgtagacaaccaggtgtacaaaattgccggacagtggaaggattttggaggatttgattttgtcgcttccggtattgactatgcgtccgcgtggtatggacaggcaaagatgattgaagcagcaggaaaatattccatgcatatcaatacagaggaatggctccatctgaactttctcctcaaggatgtcagcacaacaggaacggttgtggtcattgatgatgaaaacccggcgttaggaagggcgcgggaaactcttcattatatgcaggttatgaaacgcccactgatggttgttacagacatggaaaatccggaggtggaggatggacattgtgtgttgatgccgaaaacggattttgatattacatcgccgcttctctattttataccacttgcactgctggccggttatatcggtattatgagcggtgagacatattcgcgcagcttcagggataactggaaatttgcagaggacgcatcagctatctggaaaagcaaaatagagataatcaagtaggaagttaaggagagtctaatgataagcaagattgaaaatttcaaaatagaatcacaggaaaatgatgtgataaaacttacagatgatgtgaaagcatttgtggcagaaagcggtattacggaggggcagtgtattgttttcaccccccatacaacagccgggctgaccataacatccttttgggaccccaggggatttgaagatattcaggatgagatatgccggctgatacctacaaaaatcaatttcaagcatcagcatgatacgccgcaggatgcggcgggacacgtaaaatcatcactgattggagtgacgctggcgcttccaatccatgagggaaaactggtattgggccactcacaggggatttacttccttgaatttgacggtccgcgtaaacgtgaatactttgtgagcgttttgggagagtgattttactaggataattgacaaatctatgatatatttatagttaagtattaatgtatagacatcatagaggaggtactgattatgaataacaatataatgaaggactcgccgattcctgtatattatcagatatatgtagatctaaagaaacgtatcatgaattccagcctgcaggacgcagaggggaagctgcctacagagcaatcattggcggacagttatggagtgagccgggtgtgtatgcgacaggcgattgctgaactggaaaaagatggactcattgtgcggttccgccataaaggctcatttgtgaaatcctcacccaaacccattatgcataatctggacctgccggggatggaatcggggaaatcagtaaggcattacattgaccggcatcctgaaattgtggaaatgagggcgtttgacaatacttacccacatataagcgaagcattgcagtatcagggcaggatatattatataaaaagaattatgaaggtagatggcaatccaatcgcgataaaccggatatgggttcccgccacattggcgccaggtttggatgagaatggtctgagcatagatgggtctttgtccaaaacactgaatgagatctatcatctgaagacacacaggcgggaaaatataattgaagtggtaaggccgtctacgtcagaagtagaactgctgaagattacctatgatacattgatcctgcagataaacagtacctcctttttaacagatgaaacaccatttgaatactctgaaaactcatggattggggattccataagacttaaaatcgatgtcacggatattgaacatggtttagagtttactaaaaagaattaaaagaaaagctgtcttgaggaatcaaggcagttttttaatttataagcggaatcaattatttacaagaagggggatatcatatgcagaattttctgggacagttaagcgaagggacagaagtccttatggttttatcaatcatactgtttgcgggttttattatgacccgtttgacgaacactttaaatttaccaaaggtaagcggttacatcttggccggtattttgataggcccatgctgtctgaatttcataccggtagctattatcggccatatgggctttgtaagtgacctggcattggccttcatcgcatttggtgtgggaaagttttttaaaaaagaggtgctgttaaggacaggaaaaaaagttattattatcacgatgtttgaagcgctgatggcaggttttctcgtgacaatatttgttaagtttgtatttaatctggattgggaatttgcgcttgtattaggtgccattgccacagcaacagctccggccagtacgatgatgaccatcaatcagtataaagcgaaaggtgaatttgtagacacattattacagattgtggccttggatgatgtggtttgtttatttgcctttagtattgtatccgcgattgcgaatggccgggctgcaaacggcgtaaacgccaacgatattattattcctttggtatttaattttttagcaatcctttttggatttttctgcggttattttctaagcaggctgttaatccccagccgcagcaaggataaccggctaattctcgcaatcgccatgctgttaggaatatcaggaatctgcgcagcggtaaatatctctccgctgttgtcctgcatggtgtttggagcggcatatatcaatctgaccgaggacaaaaaattattccggcagattaataactttacacctcctgtcatgtcgatattttttattgtatcaggaatgaacttagatcttaaggttttgcagacagtgggggtgattggagtaagctattttgtcatccgtattattggaaaatatcttggtacatatataagctgtatggttacaggcatgagcagagaaataagaaactacatggggctggcgctgattccccaggcaggggtggcgataggccttgtgtttttaggccagcgtttgctgccgccggaaaccggtgatttaatgctggccatcatcctgtcatcttccgtactgtatgagacgctgaatataactgcctatgatgggaaaagacttgttggttgcctgcgtattctttcggacggctatttcttcggaacgactaccgaactacttatacttccagagtatcagaagcatggaattggaagccgacttcttcaacttgcaagggagaacacccctactatgttatattttggttcacagccgggaattaaagcgttttatgaaaagaatggctgccaaaagagtttgcagtcttatataatagagaaaaaataatattggcatagaaagctgccgttgtaggaacgccaattcccacaacggcagtttttatttgcgtttcttgcgctgactgattggcgttcccatcttctttgatttttggagaatccgaatcagctagcgaaattcttcaactgacagatttttgtagttgataccaagctgcttgcagtaaagcattgcctgtttttcctgacggctgcccttgaaattttcaactgcttccaaattttctttcagctcatcggcaacggtggtctgtggcgcactttcactgtcctttttgtgggtttcccgaatatctcggataatgacgtttatatcatctagcaccatgcggctgaaatattcatcatcattcacatgggcggcttgcaggacttttatatacggaatatcttcgccggggcgataccgttcaatgatttcatgacggacggtatcgacgagggcattgaggttttgaattgcatggtagtataactcgattttaataagtttacattattatcctgaaaaccaagggaaacgtgcgcccaaagcacggacacgtaagccaagaaatcagattactaccaatgcttaaattgtaaacttatttaaatcgagttatagtagtaatgccgtccacataaatttcaatgtcagccagaaacttgatgaaatctttgtgtgtggcaagctcacagagcagccggttgttgatacggtcacactttagaagtgccactatttcatcattcaaatgtagctccatcaagggtgtgtttatctgctctcggttttctgtccggcagaacaagtaatcaagtgacacttcataaaagtctgccagcgtaataaggttgctatgattaatttctttatactcgttggactcgtaattggcaagggcagattttgagaaagagtgcgcaactattcaccacctgaaggtagtgtattgcgccctgccgggggcttcctgcggaaagcggatgattgcccgaagcgttccggctcctgccaatcatcacaggggaaactacacttcccctgcgctggctgccgccagctaccactttgtggacttgccgcccggaacccctttgcggctgcaaactgttcacgtccagaaggtttccgttcatctccctccatagaggacggtcatagtataatagagtcagcgacaaatgcccatttaaaaaacttcttgaaaatcattttaattgggattacgatttgtttagatatagatgactttataagattggagaaaacaattttgaaattctatattaacactatgcaagaaagaataccgtcctctaaggttatttatatgagaagaactggtgagtatgacgttgaaaattacaaactgatggatacttttaagaaatggataaaagagaacaatttatatgatgaggataccgttttttatgcaatacctatggataatcctgaaatagtaaagccttgtcagtgctgttatgatgtttgcatcaattacccccaccccgaatcacaactttgcactaaatcaaatcaagtgtagaggattggagagcggtaaatatttaacttttctaattccccacacaacagatgcagtccaaaccgcatggaaaatgtgtttttctgaattggagaaattaggatatttgtttgataaaagcagacctataatggagcgctatagaaaaacttttgtagacaggcattattgtgaattgtgtgttcctattctacaatttggatttgaactattatcttgagtatggctttgcaaatcctaagttgttagaccatatgtaaagccggtacccggaagaaaacatgaaaaatcccaggcaggaaaagcaggcaaccgcttatctgtctgggatttttccctcttaaagccttattctccgccagggccgtcacggcgcggcctgaacgattccggcaggggctctgcataagcgcccttgtccttcttcacatggtccgtatcgttggaacagtccctgttttctgctgtatcctgattcatggtacgattcatgattctgcctcctttagatgctgtcagcttccctctttcacgatttcatccagaaccttaatcaggtcctgcaatgtttccaggtgcacattgcgctccaggatgcagtttttcaggtcaacggaaagggtttcgaatttgtcccgaattttcggggaaacataggatgccatatctatcacctcgatgatagtatgggcaggaatcttcattttatgcactgcatgaaaaatgggagtcagagcaatattgaaagaaaaaaatcctcccggtgggttggtccggaaggaagagtgtctgaaattccttaacaatgaatatctctataaattaagcgatggaattaacagccttggataagcgggataccttgcgggaagcattattcttgtgatatactcccttggtagcagccttgtcaatctcggtggtagcagccagcagtgcagcctgggcagcagccttgtccccagcggcaacagcagcgtccaccttcttgattgcagttttaaccttggatctgatcgccttgtttcttgcagccttagtctcgtttactaagattctcttctttgcagatttaatgttagccaatgaaatacacctccgttcttcatattataatctttgtgttttccatcaaagcctggacacggacagttcaatgtaaacatactattgtattctagctaatctgacccggaatgtcaagtcatatttggcgaatttttgaagaaatttgacaatccaatcatacatatttccggccataatcgcagaaactgatgggagaacgagatgtgaggtggatgaatatggaggaaaatgcagctgtaaacgctgtcaatgaggccgcggccagtaccttccaggtgaggacggacctggcgctggaacagcgtgagagttccatgggggaaggcggagacgtatccggagtccggctgaaggaatggcatcaccaaaaaagcggccttaaactgacagaggtaaagatactgaatgaacagggagccaagtcaatgggaaagcccagagggacctacctgaccctggaggcagaccggctgtccaaggcggacgatgattaccacagtgagatatcggaagaactggcccgccagatacaaaagcttatggcagagatgattgggtacagggaggaggatttgccctcgatcctggtggtgggactgggaaatgactccgttaccccggattccctgggccccagggtgctggataacctgcaggtaacaagacatctggacggacagtatggaaacaccttcctgaaggacaggaagcttcccgccatcagcggcattgcgcccggagtcatggcacagaccggcatggagacggcagaaattttaaagggtatcatacatgaaacccatcctgacctgattattgccattgacgccctggcggccaggagcgtgcggcgtctggggaccactatccagcttacagatacgggaatccatccgggctcaggagttggaaatcaccgccacagcctgacaaaggaaagtctgggagtgccggtgatggccataggggttcccaccgtagtgggggcggcagccattgtccacgatactgtctccgcgctggtgagggtgctggcggaaaatgagggtaccaggggaacggggagctggatcgaggaaatggacccggacggacagtatcagcttatacgggagctgctggagccggaattcggtcctctttacgtcactcctccggatattgaccagtctgtaaagcagttaagctttaccatatccgagggcatccatcaggctgtttttccgtaaggttacgaaacaagcaatatcctctgcgttcctgcatatcataataatagtatgatgacaggtgaatgaattgatgagaataagacgtggaggcgtggaccggctcgtgcgccggtttctggccggcacggtccttatactgcttatgctcctgtgcggccggtatataagccgggccgcgggaagcataacaaagaatgagtgcagaaatatgatatgcgcaggcggacaatggctggtagaagccatatggaaccaggcccatccggcagaagatcccggtgtgtcaggctcttggccggatgtccggggaggcagtgggggagtcaatgacccggatcctgcttaccgcaaatacaacgcggtaaaaacattttatgaagaacaccagtatcttgcctggtacggcaatgaagagtccggccagcagactccggaggaaacaggaatcgtggcctcaggagaagccggcgcagggggaactgccgatgcgggcgctgccggagcagacagtacccggggccaggacctggcagccggcgcgggaactatgggagcgtccggattccagggagccagccagtccctggagaccataacggggacactggagcgccccattaccggcaatacatatgtgttggaacagctgatggattacgacttcctcataaaacatttttacagcgtccacacctccaccacggcgggccgtgatctgatgaatgccagggacctgctgagccgtgacatgaccatgaagggggacgactccaagccgcagatacttatttaccacactcattcccaggaagcttataaggattccggacccggacagaccgtggtgggtattggggactacctgacccggctgctggaggccaagggttacaatgtataccacgacaaatcggtgtatgacttgaaaaacggccagctggaccggagcaaggcatataattatgcactggacggaattaccaatatactgcagcagaatccctccatcgaggtggtgcttgatatccacagggacggggtaggggaaaacctgcatctggtcacccaggtggatggcagggacacggcgcagattatgtttttcaacggactgagccagacgccggaggggcctatcgagtatctgcagaatccataccgggaggataacctggcattcagccttcagatgcagctgggagccgctgcctattaccccggctttacccgcaagatataccttaagggccttcggtacaatgaacacctgcgtcccaagtccagcctgatcgaggtgggagcccagacaaacacctatgaggaggctttaaacgccatggagcccctgtcagaacttttggatatggtgttgcaaggaaatagaaaagatagtataattcagtaagcgaacggaagcgttttccatgtggatgtacgtaagtttccggtgaagaaataccacagaaagaggataaagcatgccaacagttgaccagagtaaaattcgcaatttttgcattatagcacacattgaccacggaaagtccaccctggctgaccgtattattgagaaaacaggacttctcaccagccgtgagatgcaggagcaggtactggataatatggacctggaacgtgagaggggaattaccatcaagtcccaggcagtccgtaccgtatataaggcccaggatggaaacgagtatattttcaacctgatagacactccgggacatgtggattttaactacgaggtatcacgaagcctggctgcctgcgacggagccatactggtggtggacgcctcccagggaatcgaggcccagaccctggccaacgtgtacctggccctggaccatgacctggatgtgtttccggttatcaataaaatcgacctccccagcgcggagccggagcgggtggcagcggaaatcgaggatgtcatcggtctggacgccagcgacgccccccacatttcggcaaaaacaggtgctaatatagaagaagtgctggaagccatagtccacaagatacctgctcccaagggagatccggaagcgcccttaaaggctcttatctttgactccatctacgattcttacaagggagtcatcatattctgccgcatcatggagggaaccgtaaaaagaggaacccctatccgtatgatggccaccggatccgaggaggatgtagtggaggtgggatatttcggcgcgggccagttcattccctgcgacgagctgagggcaggcatggtaggctatatcacggccagcatcaagaatgtgcgggatacccgcgtgggcgatacggtgacctccagggacaacccctgcgcgtcacctcttcccggttacaaaaaggttacccccatggtatactgcggcctctatccggcggatggagccaagtacaatgacttaagagacgcgctggaaaaactccagctcaacgatgcctccctgttctatgaaccggagacatccattgccctgggcttcggattccgctgcggttttctgggacttctgcacctggaaatcatagaagagcgtctggagcgtgaatacaacttagacctggtgacaacggccccgggcgttgtatacagggtgcacaaaaccacgggcgagatgatggagctgacgaatccgtccaaccttcctgatcctacggaaatcgagtacatggaggagccaatcgtcagtgcggaaattatggtgaccacggaatttgtaggttcaattatgacgctctgtcaggagcgcagaggcaattacctgggcatggaatacatcgagaccacccgtgcccttctgaaatacgagctgcccttaaatgaaattatctatgatttcttcgatgcccttaagtcccgttccaggggatacgcttcctttgactacgagctcaagggatacgagcgttccagcctggtgaagctggacatcctggtgaaccgtgaggaggtggacgccctttccttcattgtacacgcggattccgcctatgaacggggcagaaagatgtgcgagaagctgaaggatgagattcccagacatctgtttgagataccgatccaggcagccatcggaggcaagatcattgccagggaaacggtgaaggctgtccgtaaggatgtgctggccaagtgctacggcggcgatatcagccgtaagagaaaacttcttgagaagcagaaggagggcaagaaacggatgcgccagattggaaatgtagagattccgcagaaagcattcatgagtgtgctgaagctggatgacgaataaataggtgggataaatcataagatgacaaacttacagaggaagcccttggagctgtacctccatgtacccttttgcgccaggaaatgcctttactgcgatttcctgtccttcagggcgctggcgtctgtccatgaggcttataccgaacaactaatcagggaaatagaagtccagggtgcctgctgccgtgaataccaggtcaagaccgtgttcataggaggaggcactccttctgttatggaaccgtgtcttatcagggatatcatgcaggctctgaacaggaatttcgacatagcggcagatgccgagattaccattgaggtcaatcccggcaccctgcttcagaacaagcttcatatctaccgcgcggcgggaatcaaccggctgagcattggcctccagtccgcggacaaccaggaacttaaggacctggggagaatccatacctttgaggaattcctgaagagctaccagtgcgcccgcatggccgggttcaccaacgtgaatgtggacctgatgagcagcattccggggcagacgctggagagatggaagaatacgctcaggaaggtgaccatgctgaaaccggagcacatatccgcatacagccttattgtggaggaggggacacccttctgggaccgttatggaaagagggaagaggaggagaccggccttaaaacagatgacgtctgctttctgcacccccggggcggccgccatacggagcaggctcccgttcccggaaaaagagcggccctttatcccgcccttccggacgaggagacagagaaccgcatatatcattttaccaggacctttctggctgaacagggatacggccgttatgagatatccaattacgccaagcctggcagggagtgtctgcacaacacaggctactggaggggagttccctatctgggcctgggcctgggctcctcctcatgcatgaacggaacacgtttctccaatgaacgtgatttggacacctatctgcatctggatttttccgaagaaggcggatcctcagcgcttgcccttctcagaggccctgtggaggaactgaccagggaagcccaaatggaggaattcatgttcctgggacttcgcatgacaaaaggcatatcagagatagactttgtatccatgttcgggattaaaatcgaaggcatatacggccctgtaatagagaggctcattgcggacggactcttaaagcgcgagggtgtctggatatccctgaccgaatggggaatggatgtaagcaactttgtactcagcgaatttctaatctaaagcgcgccagaaagctagtgttccatccagtcagaagcacgctttaattcagtggaacattgtcatttaaaccaggagattaaaatgactgagaagataaccatacgtgaaaccgtaagaataaaactggaagaatcatcagacccggagtaccgggaattccacagccggcttctgccgggaatcaccggcatcatgggagtgcgcacacccgtgctccggggcatcgcgaaagacctgaaaaagagcggatggcaggaatacataaaagaggtatcaggtgcctggaaggaaaagggccagggaacagacggcgttctctacgacgaaatgataatctgggggctgtgtatctgcggaggctgccgtgactgggacacggccagggaatacgtaaccgcttttgtcccggccatcaataactgggcagtgtgcgatatattctgcggctcccttaagattaccggccgttacaaagaggaggtctggcagttcatccagccttatttccaatccggcggggaatacggcctgcgctttggaaccgtcatgctgttatctcattacacagaccgggcctatctggaacatgccctaaaactgctggacggcgtccatcatacaggctactatgccaaaatggccgtggcctgggccctctctgtctatttcgtcaaattcccggaccaggtaatggaatacctgaagcaaagcagcctggacgactggacctacaataaagcactccagaaaatcacagaatccttccgcgtggacagagaaacaaaaaagctggtgcggcagatgcgcagggggcgctgacaggagcggttttagcggccgccgcggtgcctccccatatccatcccatccttatccccccttgtcctctacaaaaacttgtgctacaatcaaactgatatcagaaaagtcagtttatttgcgggaaaacaggaattgttgtcttaacaattggagaaaggagcatttttatggggaatctgattaacaggaccatcggggaatttaaggtacaggcgttttatcaggggaagttcatggatgtgaccagggaggatacactggggcactggtctgtattttttttctacccggctgattttacctttgtgtgccctacggagttaggggatctggctgatttttatgaggaatttaaggaagccgggtgtgaaatttactcggtgtcggaggatacccattttgtccataaggcatgggcggatgcctcggataccatcaaaaagatacagtatcccatgctgggagacccggccgggaagctggccagagagttcggcgtgctggatgaggaggaaggccaggcatttcggggaacctttatcctgaatccggaaggcaggattaaggcatatgagattcatgacatgggaatcggccggaatgcccaggagctgctgcgcaaggttcaggccgcccggttcgtggaggaacatggagaccaggtgtgtcccgcaaagtggaagccgggagaagagacgctgacacccagcctggatttggtgggaatgctgtagggaggtggaggttacgattgatttaaatacgattccgggagaaagcagtctggtggaccaggggcttaaggaccagctggccggtattttcggcaggatggagaaaaaagtgacaatcagggctgtggcggacctgtccggggaaaaggacagggagatggcctcctttctgagggcaatcgtctctgtaagccctaacctggagctggagttatacgggccggacgaggcggaccaggtgccggaactgaatacggcgtggctgcctgtaaccgggctgtataaggacggggcctatgggcgcgctgcttttcacggagtgcccggaggcagggaaattaactcctttgtgctggctgtctataacctggcagggccgggacaggaggtgccaaagggtaccagaaagaagatagaacggctggataagaaggcgaatatcaagatatgcgtgtcccttgcgtgccatcactgccctttggtagtgacagcctgccagcagattgccatcctgaatccgaatattgaggccgagatgattgacgcggccctttacgatgacctggtggcccagtatgatattaagcgggtgcctatgatgatcataaatgacagcaggattgtgatggggagcaagaccatggatgaaatcgtcactttgttaaaataataactaaaaaatagtaaaacagtgttaaaagctgttaaatatcaataaaaaaagtgctcaaattgatttaaaattgtacattatgcgagaaaagaaattcttctattgaatttgtatgtgcaatgtgctatattggaaacagatgaagacagacgaataaagttgctgagatgatgagagcatagtgaaacgacagaaatgttgatttagaactatgctctttttagtggtgaaattaagtgaggggggataccgatgaatcagaaattatatgacctgattgaaactaatccggtcatagcggcggtaaaggacatggaaggtcttgacgcctgctgcaaaagggatgagattaaggtggtgttcatcctctttggggatatctgtaatatcagcgcaatcgtgggacagattaaagagtcagataaagtagccatggtgcatattgatctgataacaggactcagcagcaaagaggttgcggtggattttatcaggaataataccagcgcggacggaatcatttcaacaaagccggccctgataaagcgggcaagggagctgtccctgtataccacgctgagggtttttgtactggattccatggcatttgaaaacatcgagaaacagatgagcgtggccaggcccgacatcatagagatactcccgggactcatgcccaaggtgatacgcagggtgtgcaggctggtgaaggtgcctgttatagcggggggacttatatcagacaaggaagatgtgatggcagccctgtcagccggggccatatccgtatcgacaacgaatcagaaggtatggctgatgtaaatatcgaagcttaagtccgctctcctggggaaggagaatgggtttatgtataaatgatacatatggtatgtatcagaacaacaagaaggagggttttttatggcaaagtatgtaatggcactggattcgggtacgacaagcaacaggtgtatcctgttcaatgaaaagggggaaatgtgcagtgttgctcagaaggaatttacacagtacttcccgaagccaggttgggtagagcacgatgccaatgaaatctggtccacacagttaggcgttgcagtggaggctatgtccaaaatcggggctaccgcagaggatctcgcggccatcggcatcactaaccagcgtgagaccaccattgtttgggataaggagactggggagcccgtataccatgcaatcgtgtggcagtgccgcaggacctccgagtactgcgatacactgaaggagaaaggattggtcgataccttccgtgccaagacaggacttgtgattgacgcttatttctcaggaacaaagctgagatggatacttgaaaatgtggagggagtcagggaacgcgcagaaaaaggggagctgctgttcggaaccgtggagacatggctgatctggaagctgaccaagggcagagtacatgtaaccgattattccaacgcatcacgcaccatgctgttcaacattaacacactgcagtgggatgatgagattctggccgagttaaacattccgaagtgcatgcttccggaagcaaaaccatccagtttcgtatacggtgaatccgacccgcagttctttggcggcccaatccccatcggaggggcggcaggcgaccagcaggcagctcttttcggccagacctgtttcaatgcgggcgaggcaaagaatacatacggaaccggctgcttcatgctgatgaacacaggcgagaagccggtgttctccaagaacggcctggttaccactattgcctggggcctggacggcaaagtgaattacgctctggaaggttctatcttcgttgccggcgccgccatccagtggctgagggacgagatgaggatgatagattcctcgccggattccgagtacatggctaagaaggtaaaggacaccaacggctgttatgtggttcccgcgtttaccggactgggagcgccgcactgggatcagtacgccagaggcactatcgtgggcattacccgcggtgtcaacaaataccacattatccgtgccacactggattccctgtgctatcagaccaatgatgtgctccaggccatgaaggcggattccggcatagagctggcagcccttaaggtggacggcggagcaagcgcaaacaactatctgatgcagacccaggcagatattatcaatgctccggtgaaccgtccccagtgcgtggagaccacagccatgggcgctgcctatctggcaggtctggcggttggatactgggctgacaaggaagaagttatcaagaactgggccatcgaccgcacctttactccggagatttcagaggagaagaggactgagatggtgaccggctggaacaaggccgtgaaatgctcttatggatgggcaaaagaagattaatcagatatgggtatgaaacaatgtgattcagcatggctgcccggcatccggcgcccctttggcacaggggccggggccatgccatacagataagggggttattatatgttgccatatattgcagagtttttggggaccatgatactgatcatcttaggtgacggcgttgtagcaaacgtgacgctcaataagtcaggcatgaagggggctggctccatccagattacctttgcatggggccttgcggttatgctgcccgcgttcatcttcggcgcagcatccggcgcgcatttcaatccggcactgaccattgccctggcagtggatggaagcatggcatggggacttgttcccggatacattgttgcacagttcgcaggtgcttttgtgggcgctgtcattgtgtaccttctgttcaaagaccagtatgacgcaaccgagtcagcggcaaccaagctgggaaccttctgtacaggaccatccgttcctaacatgggacgcaacattttaagcgaggcagtgggtacatttgtacttgtatttgcaatcaaaggcattggccaggtaaccggcattgctcctggcgtagataaactgcttgtattcggaatcatcgtatcaatcggtatgtctctgggcggtctgaccggttatgccatcaatccggcacgtgacctgggaccacgtcttgcacatgctgttctgccgattaagggcaaaggtgattccaactggggctatgcgccggttgtcatcatcggaccggttgtgggcgcggtagcggcggtgttactgtatcaggcgattccgtggatgtaacatatagtatgaactgaatattgattgcgtgagaacagagcggagcaaatgggtgtggaaacacgccttgtttgctccgctttttaaacccttcggggctgaatgttggccgcccgggctggctgctttaagaccaggccggcggatttaaaataaaaggccggcccggtgagggcggcggcaggaagatgccgggaggattcggcattttcacaaaaaaagaaggaagggaacaaaacatatgtatgacgtaataataatcggggccggcgtgtccggcgctgcatctgccagggagctgtcacggtataaggtgaatgcctgtgtcctggagcgggaggaggatgtgtgctgcggcacttccaaggccaacagtgccattgtccatgccggatacgacgcggcggaaggctcgcttatggccaggctgaatgtggaaggaaaccagattatgcctgaactggcaagggagctggattttccctttaatccctgcggatcctttgtggtatgtctggatgaggagtctctgccggacctgagagctctgtatgagcggggggttaagaacggtgtaaaggatttggaaatcatcacggataaggcgagaataaaggaaatggagcccaatctggcagatgaggtggcgggcgttctctatgcacctacggcaggcatcgtatgtccctttaatctgaacattgcgctggcggaaaatgcctataccaacggcgtggactttaaatttaacactgaggtgacggatatccgcaggatagagggcggatgggctctggaaacaaatcagggcgtgtatgagacccgctatgtggtcaacgcggcaggagtccatgccgataagttccacaacatggtcagcgggacaaagatacacataacccccagaaggggagattactgcctgttggataagagcgccggaaatcatgtgagccgcaccatatttgctcttccgggtaagtatggaaaaggtgttctggtatcccctacggtccatggcaacctgattgtggggccaactgccattgatattgaggataaggaggccacggccaccaccagggagggactggacgaattgattgcaaaagcagggatgaacgtaaaggacctgcccatgcgccaggtcatcacatcctttgcgggactcagggcccatgaggatcaccatgagtttatcataaaggagctggaggacgcgcccggattcgtagactgtgcgggaatcgagtcgcctggccttaccagctgtcctgccattggaaggatggtggccggaatccttaaggaaaagctggggctggagccaaatccgcagtttaacggcagccggaaggggattctggacccggatacacttacaaaagaggagcaggcagagctgattaagcagaatcctgcttacggaaatatcatctgccgctgcgagatggtcacggagggagaaatcctggacgccatccacaggcccctgggagcgcgttccctggacggcatcaagcgcaggaccagggcgggaatgggccgctgccaggcggggttctgcacccccagatccatggaactgcttcaccgtgagctgggacttcccatgacggagattacaaaggccggcggggattcgaagcttgtagtgggaaccaataaggacagaatatagaaaggggcgcgcgcaagatgagggaatatgatattgtcataatcggcggcggtcctgcgggtcttgctgcagctgtagcggccagggataacgggatagagagcatcctgatcctggaacgcgataaggaacttggaggcatattaaaccagtgcatccacaatggattcggcctccatacattcaaggaggagctgacaggcccggagtacgctgccaggtttgaggaacaggtgtatgagaggaatattgaatataagttaaacaccatggtcatggatatcagccatgacaaggtggtcacggccatgaacagggaagagggactgtttgagatacaggccagggctgtcatactggccatgggatgcagggagcgttccagaggggcgcttaacatacctggctaccggccggcgggcatctactgcgcgggtacggcccagcgtctggtgaacatggagggcttcatgcccggacgggaagtggttatcctgggctccggagacatcggccttatcatggccaggcgtatgacattagagggagccagggtgaaggtggtggcggagctgatgccttattccggaggactgaaacgtaatatcgttcagtgtctggatgattacggcataccgctgaagctgagccataccgtggttgatatacggggaaaggagcggctggagggaatcaccctggctgctgtggatggcaagggtaagcctataccgggaacagaggaggattatacctgtgacaccctgcttctctcagtgggactgattcctgaaaatgagctgtctaacgggatgggcgtggaaatgaaccgcgtcacatcagggcctgtggtgaacgaaagcctggaaaccaatatcgaaggcgtatttgcctgcggcaacgtgctccacgttcatgatttagtggatttcgtatcagaggaggcagcggcggcaggtaagaacgcagccagatatgtgaaggacggcaggcgctccgggacaggacaggagattgagttaagcgccgtggacggggtacgctatacggtgccctgcaccatccatccggaccgcatggaggatacccaaatcgtacgtttccgtgttggaaatgtttataaaaactgctatatcggcgtatactttgatggtgagcaggtaatgcacaggaaacgtcctgttatggcgccgggagagatggaggagataaagctccagaaggaaaaattgatgttgcatcccggtcttaagaagattacaataaaggtagaggaggcatagaccatggaaaagagagaacttatctgtatcggttgtcctatggggtgtcctctgaccgttgaactggaaaacggggaaatcaaggccatcacaggatacacatgcaaaaagggcgagacatatgcgcgcaaggaagtgaccaacccgacccgaatcgtcacctccactgtgagggtggcaggcggacgggctgacatggtatctgtcaagaccagggaagatatacccaaggataagatattccagtgtgtaaaggccttaaagggcgtaaccgtcaaggctcccatccacatcggagatgtgatcgtggcagacgtggccggcacgggagttgatatagtggccaccaaggaagtactatagtcgtgcgttcctgctggagatgggacagaaatatggtttccttccgaaccagcaggggtgcgccggtcagtcggcagctgccataaggcggccgccggcttactgtagtttgatggatggcggaccggcagaatggggcgttgtccgaagaagaaggagggctctaaatggagaagaaactggacatcaataacatgaacggaattacagaggaagaggataagacctgcggactcaatgacatgaactgcctggaaggggaagaggataagacctgcggacttaacgacatgaactgtgttgaggaggaagaggacaaaacctgcggacttaacgacatgaactgtctgggcgagtaacgggaagaacggagagcagaggcttacaggaggggatgcggacgggtatgaatccgtccgcatccccaaagggcggcccctgctttacgtggtttatgaaccaaaggggaaaccgctgcccgtatttggtgcagcctattaaatagaagggggtttacgcaatatgaagaaatttatcaacgatgtggcgctggtagaggagcagatgatacagggtatggttaaggcgtatccgggttatctgagaaagctggactgcggcaatgtggtggtcagagccaataagaaggaaggtaaggtggccctgatcagcggaggaggaagcgggcatgaaccggctcacggcggatatgtgggatgcggtatgctggacgcggctgtggccggcgcagtgttcacatcgcctaccccggaccagatttatgagggaatcaaggccattgccacggatgcaggcgtgctcatggtagtcaagaactataccggcgatgtgatgaattttgagatggccgctgagatggccgggatggaaggcatcaccgtgaagtatgtggtgaccaatgacgacgtggcggtgaaggatagtctgtacaccgtgggacgcagaggtgtggccggaaccgtgtttgtacataagatcgcaggcgccatggcagagacaggcgcttccctggacgaggtccatgcggttgcgcaaaaggtaatcgacaacgtgcggaccatgggtgcggccattgcgccatgtacggttcccgcagcaggcaagccgggatttgagctgtcagatgatgagatggaagtgggaatcggaatccatggagagccgggaacccacagggagtccatgaagactgcggatcaggtggcggatatgcttctggcgcagattttgggagacattgactatgagggcagcgaggtggccgtgatgatcaacggagcaggcgcaacgcctctcatggagctctttatcatcaataacagggtttcagatgttctggctgaaaagggaatcagggtttataagacctttgtgggagagtacatgacttccattgagatgcagggattctccatctcgcttctgaggctggatgaccagctgagggagcttttggatgctccggcggatacgccggcctggaagtaacaggcatttctgaggtcataaaaataaattgaaatgaaaggtgggtcatcatggcagacagtaaaaaggtattggaaatcatcaaggcaatcggtctgaaaatggaggccgagaaggagtatctcacagagctggaccagccgattggagacagtgaccatggcataaatatggcgcggggatttgcagcggtggagggaaagcttcctgacctggagggaaaggatatagggaccattctgaaaacagtgggcatgacattggtatccactgtgggaggcgcttccggccccctgtacggttcagcctatatgaaggcgggcatggccctggcaggaaaggaagagatggatatggatgatttcctgtccatgatggatacggttgtacaggcagtggagcagagaggtaaggccactgtggaggaagccaccatgctggatgccatggtaccttccctgaaggccatgaaggatgcggcggcagagggaaagagcgccggggaggtgctggaggcaggagtcagggcagcctgggccggcgcagagcacaccaaggatctggtagcgaccaagggccgggccagctatgtgggagaaagaggactgggacatcaggatccgggagccacctcttattcctatatgctggaagtcattgcggggttggtatagagacagaaaccggatacaaatatgggcatagagataccgtgtccggctgaaaggagcagtagtacatatggtaggatttgtgattgtgtcccacagtgaaaatctggcaaaaagtgtggtggagctgacctccatcatggcgccaagcgcaagaatagcgccggccggaggcatggacgacggaggctttggaaccagctttgagaagatacaggcggccattgagtccgtatattccgatgacggggttcttgtcctggtggatttgggaagcgctgtcatgaccacggagatggtcattgagatgttcggggaaaagaaggttgagatggtggattgtcctctggtggagggcgccgtggttgccaccattgatgccgtgggcggaatgagctttgaggatatcaagacagctctggccggagtgggcaaggctaagaagttttagcgcgtgtcagaaagcaatgttcaaacacgctccggggcataacaatgaataaatacaataggcggggaaatcattccccgcctgttatggttacaatcatctgattgggaaggcacacaatggtgtcgctgtttaaatgctttttcccctggtggacacagaccttatcagggcagctggcctcactgcaccaaatttcaccgtcctttacaatcaggtagttggtgccgccgttaggggaggtaaccgttatctccgtatctttgctgagatccagtgtttccactacggttccgtccacagacacctgggcaatggctgccggtgcgcggcggatatagtggctgatgccaaaggcagcagccgccatcaacagtattgccgcagccagaatcatgtctcgcttctgtaacatgttcatttgatttccgcctgacgcaggcattcctccactccgtttataaatggatatacgttgatgctgactgaggccacggcgtcagtggtgtaaccgtcgtcaccggccagcccggccagacgctggtgctctatcaggtaacggcagacgctgtctgattgggctttccatacaggcccgtccggcgtcatgatatactggccttccatggaaagcttctgtttgctttccccgtcactgttaaaggaatcccagatacaggatacgatgataccatcggatactgtcagggtggttctgtcccgaaaaccgtttgagtctggttccggagcttcataggtatagattccgtcggccagaggcgcttcggggctggctgtggtaacaggtccccgtaaggccttatacaaagggtctgatacagcaattaccgctaaggacaacacggccatgactgcaatgccaattaaacttctggcattagaactgatggtatttttattcatggaaaacactccttttgaaaatatagtagtatgcgctgcggcaaaataaacgcggacggcgctgggttgggatatattatttattttatcacaatacgccattgcatacaatgagttttcgcacaggcagcggtggtaattcattcccgtccattttcatacatgaaaacagttcagacggttgccgttctgttgccgcctacgctccaaggcactatggaagaattgggtcatgcatggtatactatatgcgtgttgaacatgcgtgttcaacacagagcgcagggcaaggatgaaatgccgcgatgaagacgggaggatcatatgacgaatcagaaaaaggcagtcacagaatcatataaagactcagctgtaacggtgaaaaaaggccaggcaaaacaagtccccggagcctctgccagaaatgcggccctttttgggatactgacagccctggcactggtgctgggatacgtggagtcattggtgccggtatatctgggagcgcccggggtaaagctggggctggctaatctggttaccatggtgggactgtactgtatgggaacaaaagagacagctcttatcagcgtggtgcgcatacttttatcaggcatcctgtttgggccgccttcggccatcctgtttggtctgtcggggactgccctgagccttaccatcatggccctgtgcaagcggttcaggctgttcggaatggtgggagtcagcatattgggaggagtggcccataatatcggacagtttctgatggcggcctttgtggtgaatacgttcggcgtgttttcctacctgccggtgcttctgacagcaggctgtgcggcgggagcgctgattggccttctgggaggaattctggtgggccgggtgaaccgtttactccgatccgtttaacaaaaacaggatataaaagtaaaaaagtgcattgtggttacggggtgtgagggttataatggaagaaaacagcggcatgtggctgcgcttagatggaagagtgtacagggaggatatttctatggtttatgaagcggttaagggattggtacagtacggtctggataaggggctcatatctgaggtggacgctatttatgccaggaaccaaatcctggatgtgatgggaatggacgagtatgaagaaccccaggggccggcggagagcggggatttggaggccattttaaaggagcttctggactgtgccgcggacacgggcgtgcttaaggaggacagcgtggtttaccgggatctgctcgacacaaagctgatgaactgcctgatgccaagaccgggcgaggtggtaaaagaattctggaaacgctatgaggagtcccctgagaaagcaactgactggtattacggctttagccaggactccgactatatccgccgttaccgcattgcaagggatatgaagtggaccacggatacccgttacggtacgttagacattacggtaaacctgtccaaaccggaaaaggatccaaaggccattgccgcggctaaactagccaagcagagcggctatcccaaatgccagctgtgcatggagaatgtgggatatgcggggcggaccaatcatcctgcccggaataaccacagaatcattcccattaccatcaatgacagtcagtggggattccagtattccccatatgtgtactataatgagcactgcatcgtgtttaacggacagcatgtgcctatgaaaattgataaggcggcattcagaaagctgtttgactttatcaaacagtttccccattatttcctgggctccaatgcggaccttcccattgtgggaggatccatcctgagccatgaccatttccaggggggacattatacctttgccatggcaaaagcgcccatagagaagcattttaccataaaagggtacgaggatgtggaagcgggaatcgtattctggcctatgtccgtgctgcggcttcgggcggctgacccggacagactgattgagctgggggatgctgtactgggagcatggagaggctatacggatgaggatgcatttatctttgccgagacagacggagaacctcataacaccattacgcccattgccagaaaggttggggatacctttgaactggatttggtgctgcgcaataatattaccacagaggaattcccgctgggcgtataccatccccatcaggagcttcatcacataaagaaagagaacattggcctgattgaggtcatgggactggctgtgctgccttcaaggcttaagacggagctggcaatgctgggagagtacatggtggatggaaaggatatacgaagggatgaggtccttgagaaacacgctgactgggtggaggaattcctgcccgtttatcaggaaaagggcatcccggtgacaagggataatgtgtggtccatactgcaggaggaagtgggaaaggtgtttgcacgggtcctggaggatgcgggcgtctataaatgcgacgggcaaggacggagggcatttgcaagattcctacactttgtcggctttgaagaggtataatcagcctggctgtaagatacatttacagtaaacagaaattggaaaattgataagtatgatttaaatgagaactgtattgtattcgatatggaaggcagtaaaaaggatatcataagaatcctgtcaggggagctgtacagggcaggaaaaatcacggacacagaggaattttatcaggatgtactggcaagggaagccattaccccaccttcgtgggctttgatatgggccttccccatggcaagacggaccatgcggaggcgttacggaatctgagaaataaacatttgtgagaaacgtatttaaaaaattcagaaaactagaagcggggactagccgcagccccgcctgcttggtataatggagaatataccgcggatgactgcggtgaatgacggaaggagacagtgacatgctggatgaaagatgggtgtttcatgagaacgcggagccggttcaggcggggcctggggttgtcaggagggttctggcttacagtaaggatttgatgtgtgtggagaatacctttgaggagggagccgtgggcagccttcatcatcatccccatacccagattacatatgtggtaagcggagaattcgagtttaatatagacggtgagaaaaaaacagtgagggcaggggataccatgctgaagctggacggcgtggagcatggatgcgtgtgcaggaaggcaggcattcttctggatatctttaatcctatgcgggaggattttgtataggtgaaccaaagaaaaatcttgtgcagtatgctaaaaaaacagccgatttgttgtaagataacgatattctttcgcgagaacattggcttttgttcctggattggtataaccggggagtaaatagttgcgtgcagagcttcggcttgattttgtacaacatgagtttgtggacctttctttttcaaaggtccgcggattcgtgttgttttttgtcctaaaatgagcggtctcggaaacttgataaacaattgatgcaattttcaaacaattaaaaaacgccaatgaataatcgggaaacgagaggtggaggtgatgattatccagggaatacagaataaagaagggcatgatttttagaccttcgacaggaggtcctttgataggatatttggataaatgccagatatcagttattccgcattctgccgctttttaaagcgggcatctaaatggatgcatatagcagtgatcgtggtcatgaaggaataacgtggttttccatggagtaccatccggtggagaccataatcattcaggacgcggttgttgatgcgctccgtagcggtacgctggttatagatttctttatattcctccgtgccgcgtgggacttctgtataaaggcggatgctccattcgggtttcgtttttatgacgcggccatatttggactgggaacagtcacagctgcatttatcggaatcttagtaatgattttgatttgaacatgatgtcagcaccgtgtcagttaaaacaaataagaaaagtgtgataatgtggcagtttgcactaataagcggattgccacatttttatggaaaaatggacatttatgtggtaacatataggagcaaagataaaaacacaacgcgaggtaatcttgtagaactggtaggtagtccagtcgcaccgatttggtgtaagtagccctccctccttgggtcgtccgttctttgtgcattacaattttcaaggaggaattgtcatggacaaaatagcgggcagactgacagtattttttgaagaaccattcgggataggcgtgtttgaacgaatatctgagggaaagttatctgtgtgcaaaatcacatttggagcagaaccaaaggactatgagatatacgattttgttctgaaaaattactatcggctgaaatttagtctggctgtggcaactgatggaagttgctcgcaatccgaaacgggtacagcgggaagtgcggaaacaggtgcagaacaccgggatatgcacaaaatcgcaataggctttgaaattacagcaggagcagttgaaaaatgaacgcaagactgtgagccgggagcaacgggaagcagagaaacagcggcagtttgaactgaaacagcagaaaaggaaagaaaagcataggggcaggtaacgcctgccccggcttttctcaattaagttgcatattgtctattgttacgctttagggtatctggaatgcttattttataagggtttgagagtgcaaaaatggtgttggtgatactttatacctttattactcaaatgcggtttttgttgcgtaacgggaataattagcggctatttgcataaaattttaatggaaagccttattgactttcctctttgcacttgctagaatgtaggtacaaagaaagtttaccactgaccgatatgtggtatataaatggtcgggttgaaagtttaccgctgaccgatatgcggtatataaatggttgggttgaaagtatagtccttcgccgcaaggtgggggactttttccataatgaggacaggcaaatgaagaaaacaggcttttatattatcaaggacaaattttttgaggatatgccagacccatatctcaaagggaataaggcgggaaacagaccgcattattattgctttgaagattcaagtaccgggatatactggatgataccattgtccagccgcattgataaatacagacggattatggagaaaaaagtaaaagccgggaaaccctgcgatattctccatatcgtcaaactggatgacagccgggagagcgcattcctgatacaggatatgtttccgataacagaggaatacatagaacgggaatatacaatcgctgggaatcatctgatgttgacgagtgagcatactgccagagagattgagcagaaagcgagaaaagtcataggtatgttgaagcgtggtataaagttcacaccaacgcagccggatgttatggcgattttgaacaagttgagggaacgcagatagatttccttgttggtgcaaaaattacatggtgctagcaccatattgaaaagtactacaagcaatcagggataggagaaatgaagtgttggaatctttatatacatttaggtgtctggtagattataggtttaatggcacggatcgagtggaaaagcaaaatgaatttttggcagatgtgtggatagatacagatttttcaaataatgtttcaaataaaatacggaataaatgtagagaattagggcaaaatgggtgggttatctctcctttttgggaacctaataatgaggaaacttggaaggggatatgcgcgatttgaagttgagaaaaataattggtggattgaagccgaaaaattatttgataagaagctgttttttagctgtgctttagtcttatctgcattatttgaaagagaaattagaaaatgtccaatcgataattggagtaataaaactacacggtattttaaagactcaatttcagataaaatcactcaaatttattgacgataggattgaacctatcagtagatatatagatacgttattgctaattccctctttagatggctttaatggattgatggccatcatccgggatacctatgaaatggatccctacagcaattccctgttccttttttgtgggagacgctgtgaccgaatcaaggcactgcattttgaaaaagacggcttctgccttctgtataaaagactggataacggccgtttccagtggccaaggaattcctcccaagtaaggaaccttacccggcaggaataccgctggctcctggaggggctttctatcgaccagcccaaggcgatccgccccgtgaaaaagaaggacttctgatttttgtgcaaaagggagaaaattttttctgcccttatgcatccggaacagctccatggggaacttatccacatgtcgacagagccgctgcggcgattggaggataaccgtctctgtttttccggactcgctgtctttatgtggaaaacatgctgtttttcatggaataggttctgttgaagccagcggttttccactttttcgcttcgtcagaatgacgaagaccgtgcggtgggaaattcgcttccctgcgggcttttcaggtgccacctggttttgctgtgcagtaaagcacatcattcattgaatataaagccgtaaattttaattcatatgcgagaagcatttagaaatcttaaggtggacggaaaacttcatcatggcagtggaacatttaactatggggattggggagtatggttataaaaagtaagctgtggcaaagataaaaacacaacgcaaggcaaccttgcagaactggtaggtagtccagtcgcaccgatttggtgtaagcagccctccctccttagggtcgtccgtgctttgttcattacaatcattttaaggaggaattgtcatggacaaagtttcgggcagactgacagtattttttgaggaaccattttgggtaggcgtttttgaacgcatatcagagggcaaattatctgtatgcaaggttacatttggctcagaaccaaaagactatgatatgtagttgaggcgggggaagaatgttatccctaagctgcataatcaatcaacagtgccggatagtagcgggactctggagtctgacagttgatagcagaatttttcggccgctttgcagtctaattcctcatgagatacgggtgacccgctgtaatacacgctagtgcggttgatatcaagaagagcagcccctgttttgacagggagttctttaccgaaaggtttcggactaaatttactctcatagtcaggtccaagcgtttcttaagatttttttcgaccaatccacctgcatggtaagttgccaacttttttggcatattctgctttttcgtcttaaattacgataccattaatggaatgccggatataagacatttttggaagaacacaggagaaaaaaattactattaagggcattggaagttttaaagcataactgataaaaatacttttggaaagggcggtaaaatagtggcgaatttaagactgaagaagagcattttggaggtggtggataatcagttaaaagcaaacgatcctccatgcacgaagaatacatatgacaaactgttggatgccgggtattcaaagtcagaagcaaaggataaaatcggagcagttgtacttacagaaatttatgatattttgaaaaagggacaggcttttgatgaagaaaagtataaaagcagccttgaggagatgttaaggcaaagtattgattatgaggacgatcatcacataagaacggaatgggataagtgggatgagttggttcaaaaaggatatgaatcttttgaagaacaaaagacagcagaaggcctgtgtttttggcaggaagcgtgggatatttttgaatctgttatgaaacaggttccggaaacagagacactttatggtctgatggagtcacaggattatgtatatccgattgactgctggcttcaggactatgagatggaactgggaaatgcaggaaaatatggggaaagaattgcgttctgccaaaagatattggagatgtttgattggcaaggcgaagacgacagctgttttcggtgcggcattggcgaatccctttttcgggaaggaaaaacagcggaggcatatgaatattatgaaaattggctgatggatgactcgcaaaacgtaaatggaaccaatagctttagctggattctttttgaaaatggagatgcagagaaagcgtatgaagtggtaagaaaagtgacatggggtgtttcgtgttacgtggataattcgattctttttatgcgtgcgcggcaattagccgattatgtcggaaaagaaaacgaaagcaaatggtatcagcagcagttagacacattcgagaactcgattaaaaaatgggaaatggatgaagatgaaatttttgatgaatttacggcaccaaaacagattccggttgtaaaagagaaaaaaatatatccaaatgatccctgtccatgtggaagtggcaaaaagtataagaaatgttgcggaaaacagtagcgactatcgttacggttaaatatgcggatgtttatcataaaaaagtgaacgcaaatttctcaaatcagagtcataatatacacatggattggtaaaccattttctcattattctttgattggtagtaccggtttgcaaaggagggtgcaagccaccggataccataacaataaagaaaaatagtgtgaggaatacgagtaatatctatacggagtggtatagataaatatacacgactttacagagagtatgaaaaaaagtctgtaaattgagatcttctatgataagttaatgagaaaggtaggtggatgtcgtgaccacctacctttactatacggatgcttttggattctgtcaagatgtattggaaaatcccatcaaattatggtacacttcttacaggaaaacatcaggaggtgtgccatgaagctaaaaacagacgatccctttgtacctgaagatatcagggcaaagatcaatggactgcagtccctgctggatcatgcagccgacttatacagtgatatctatagctggtatgacagtgaactgaaatcctatgacccgaaagccaccgcagacgatgaactgtttgaccctggcacagggactgttgtggaggggatcgattacctgtctatcatggaatccctgtcagagctgcagacagccaacgaatgtaaaatgcagagggattaaccttgtgtcccatcggcctggcctctggcgatgtcttcccgtatcagggccttgatggccccttggacggaagtgtccctgccatatttgtgctgtctgacccaggccaggatatctgcatctgtcttcatattcagttttaacttcacctgtacagtattatagctgtcgtacctgtcctgagcatcgtattttgaaaatccatacatggaaagctcctttccggataggtgtacacctatgcctgtgcgctcttattccggcagtctgccttcgtacataatggacagttccccatagacctgcccccagttgcggatgggcatggtccacttcttcgtcgcctcgaacgtggccaggtacagagcctttaagagcgccgtgctgcccgggaacacgctccgctggcggttgagcttccggtaggtagagttgaggctctcgatcgcgttggtagtatagatcaccttcctgacctccatggaaaacttgaagatgggggataccacatcccagttgtcatgccagcgtttcattgagttggggtactttggcgtccacttttccgtcaccttctccagcgcctccagcgccttttcctcgtttgcggcatggtagatggttttcaggtccgtggcaaatgctttccggtccttgtcggagacgtatttcagcgtgttccgtaccatatgtacgatgcagcgctgctgctccgtcttcgggaatgccgccgttatggcttccttaatgcccgtgagcccgtccgagcagagaatgaggatatccttcacaccgcggttcttcaactcgttcagaacgcagagccagtacttggagctttcattctccccgatctgtatgctcaggacttcctttttaccttccagcgtaaggccgaggatgacataggcggcaagcttgcggattaccccgtcctcccgcacggaataatggattgcgtcgatgtagaccacgggatagacttcctccagcgggcggttctgccagtcttcaatctgcggcagtatcttgtccgtcacgtccgagatgaacccttccgaagcctcaaaaccataaatgtccatcaaggtatccgagatttggcgggttgtcatgccttttgcatacatggatatgatcttctggtcaatgccggaaatgtccttctggcgctttcttaccacctggggttcaaacgtggacttcctgtcctggggcacctggatgtccatgctcccgaagctgctgttgatccgcttgggcttgtagccattgcggtaatcatccgaatccgaccgttctgacctcccatagccgagatgctcatccatctccgcttccatcatctccttcagggtgctccccagcaggtctttgagggcttcctggatatcctccgcagtctggatgtcatactcttccaggagctgatggacgatgttccttttcccctccgtcatgactactttgtgtacgggctgtttttctcttcttgccataataataggcctccttatgataatagattttatcatagaagacctaatgcttaatagctatttacagaaaaactttcatactctccaaaggaaagtgaccctgtacgacaaactcattatacaacgaaaagaacctgattggtagacttcatcaatatttttccatctattttaaaacgttttcttcccctgccgcggagactttatttctactggctttatccatacttgccatggagtcggcggattccatccgttccctctaccgacattttttgtctggcatcacccaaaagtcactgactgctttttattatgcctgttcctactccaaagcagactattccagattcatgaatgtaacggcatccctggctttaaaactcattcctgactccctgaagtcacagccggtcttcttctgcattgatgataccatgatttctaaatttggaaggaaatttgaagatgtttcaaaactttttgaccatgcagcacacaatggctccaactatctgaacggccattgctttgtcagcctcatgctttgtgtccccatatggagcaaccgccggattgcttatctggctgtccctctcggttaccgcatgtggcagaaaaaacaatcgaaactggagcttgccgcagccatggtgcctcaggtcatgccctcttttgcttctcagaagaatgtcataatcctttgtgacagttggtacgccaagaaaaatctcgcctgtattgttgatgaatatccaaatctagatttgatctgtaatgccagggctgactctgttatttatgaccttgccccacagccaaccggcagaagaggcaggcccgcaaagcatggggaacgcctttctattaaagaggacttcactctttctgctgaaaagataggggattactacatgggtgtacgccgggtccttaccaatatcttcgggcaaagggaggttcccgcctatgtaacttctacagagaaaaccggcggctccagacgcctgtttttcagtacgattattccagagcagatgcagatattctgcgcatggcaggaaaaggcgccgctaaaccagaccgggagtgagcgtatgcagttcatcccattattgtgttacacatttcgctggaatatcgaggtgagttattatgaacagaaaacgttctggtcgttatgcagctatatgttacgcagtcggaagggaatcgaaatgttggttaatctgatcaacatctcgtattgtgccatgaagatactgccatatcaggaagaatcattttcaaagtaccgtacagaaagtgtgcaggaatttcggtttgcccttagtgagcaaatccggcagcaggtattttataccactttcgtgagaaatatcgaaaccagcataaaatccagtgttgttatgaaagctttaaaacagttaattcggcaacagtgctggcatttataaaagttgtaaagtcgtgataaatatagaaaaacaagattaaaacaaaaaactttgcgggttcgaataggattttgcaaaaataagcctagtatttatgcggattccaaacaaaatccgttaatattttggcaacgatttggcaacaatccgaacagcaactgagtggatcatgcaccgattaagctcgcttaaagaggggcaatgatacacgaagttattcctggctgatttctccggattccagttttgcagccatttgctgccatgcaagaaaaggtgtgaacagatgctgatagttcttgtgttcccggtcaaggcggagagagagttctccgtcgatttctccgattttgattccatacatatcttccagtgcaaagagggtgtgcataagaccaagataggagtcaatgtccggaacattgattgctcttgggctgatatcgaagatctgtgccatttttttgatcaggtcagctttgggagttctggcttctgtttcatactgtgccacacgaacatccgaagtctttccgaggaaccccaaaagctcgccaagctcaacggggagcatgggaaaagaggttccgaaggaaatgaagttctggacaaaggaacaatatctgaaacatgcttagactatgatgggcaagcccagatcttattacgcttttgaaatgctgtactggaccggaattcgggatggcgagctgcttgccctcacaccagaggatttcgattttgaaaaacagacggtgcggattaataaaacgtaaaatggaaaggggatgcaaagagacaggagttccagtcatacgaatccacgatcttcgtcacagtcatgtttctatatgtggcagatattctgacaagaatggatggtgtttcttagattaatatgtcttagtttatgaaatcattatatacgagtttcgcgagtttcatgcaatccaagggtatcttgacaattaatttaatcagtgatagaatggcaagaaataaatgagaatttcaacccagatagaggtataattatgtttaataatcagttccagaaactgaatagggacgacgataggtagcgtttgtatctgtgatttgtcataggtgcaagcgctaaatgtgttgtgcctatgtggaatataaagataatagaccacattggtaaagataaatactttgctcgtgtggtttttttgtaccctttttatcaatttccatacgagtacatattttgaaagaaggtgatcgtatgggacataaagacgatgttcttatggatagtagttgttttataaaaatcaaataacgagatagaaaggataaaacaatggaaaatataaaaggaaatattattgtaactgaattggaagctgaggagttagtagaacacatcggagaaacaatacaaattcatggaagtatctacaaagttagaaaaatgaaaggtttttcttttgtgttattaagaacaaaaagagatgtagttcagtgcgttgcttcgggaaatctcgaaataccagcagaagaaagttgtgtaacaattactgcgattttagtggcggaaggtagaagtaaaacaggatatgaattgcatattaaaaatataaaagttttaagtaaacctcatgaaatatcaccaattgtaatcaaccaaaaaatcgtggatacttctatagaaaatttgcttgactatagaccaatcactttaagaaatgaaaaagaaagagctatttttaaattacaggaaggcatttgcagggggattagagaattcctttataatgaacattttacagaagttcatacgcctaagatcgtgcagtcaggagcagaaggaggcgccaatatattttctttaaactattttggacaagaggcatatttggctcaaagccctcagttttataagcagatgatggtaggcgtgtttgaacgtgtatttgaaattgcaccagtgttccgagctgagaaacatgatacatcaagacatttgaacgaatataccagcgtggattttgaaatgggctatataaatagttttgaggaaattatggaaatggaaactgcaatgctgaaatatacattgaattatttgtctgagcattataaaaaggaaatagcattgcttgatcttaatttgcctataattgagacaattcctgcaattagttttcatgaagcgaagattaaaatagctgaggctcataatcgtcctgtaaaagattgggaagattttgaaccagaagaggaaaaacttttatcagagattatttttaaagaaactggaagtgaattcgtttttgtaacacattatccgagtgtaaagagaccgttttatgctatggacagtaaagaacatactaatgaaacagaaagtttcgatttgctgtttagaggacttgaaattacaaccggtggtcagagaatccataattatgaagaacagattgcaaaaatgaataagaaaaatatgaatgtgcaattgtttgaaagttatcttatgatgcataaatacggtatgccgccacacggaggacttggacttggcttggaacgtttcactagtaagttattaggatatgaaaatgtaagatttacgacgttgttcccgagagatattaacagattgcttccttaaagcatgctgtaattgtgtgagaagtggagcagaaaaaaccgcattttaacaattatgatgcataaggggaaatattgctttccaagttttgacttatttttacaatcttccaattctccccgttcttctccaacacaagctcaaactgcgatacctgcgttgtatagtctcttccgccgtcttcttcatccaagaacacaatcaccaccaaaagtacagggagaaaatcatcatgaacacgccggagcaggcaaaaaagaggtgtcttagcttcatggtttctccccttttgttggggctggttgagagcaggctttccacacgttcagctccgatactttccacatccgagttgccgtattgcagcaggagccacggctgtttcacctgaatggagaacaggctgtcacggataaggtctacactgtctttcccctgactttccgagtttggcagcacaatctttgtgccaagtgacaggctggcgttgatgtctgcggaaaattcattgattttcccgatatagtccggggcataggcgataaaggctgctgacagcacgaacactaccacggaattcacaacggcgtggattgtttttgtggttacccgcttgataagcccggtgcaggcaacataaataccaactaccagaatgagaatgcaggaacccgagatgggatgagaacggggaaagacgttggaaacaaaggcggagctgctgcgtgaaggggcagtgcaccgggtgccggcgcatcccctgcggtatctgatggacggggccgggcttactatgccttaggtggcagatatgaaatggtggtcggagcggttatgtactgcccggaatgtggaaatctgcaggtggaattaaaaaaattacaagatgtcaataaaaagaaccgaataagtttggcttagtcggttcacttcacatatcaattcaatatgaaaatagagaaatttaagtatgcggcaaatatacaccatatcagatagggaatttgtaaataagcagccagagggctaacaatgtaaaattgccttatcataattattattataaagattaacgcaatgagccagataaaagcaaataggtaaaggtccaaaccgaagaagataatgctccaacaaaagttgaagaataactgtataccatagatcaacaaagctttcggtttattgggactgtttgaagaataaactatatatgaggatattcccatcagtatgtaaagtattgtccatacgataggaaaaataaatcctggtgggctaaaagctggtttatctaaaatagagtatgataacatatttccgctaaataatgcagacattgaaccaactgctaatgggataagtattgatataataagagcacttttatttcgtattttcatatactggtatgcctattgtttatatttagttaattatatgtaatggggttataaattatgattttgttagaagtgagattagctaaagactcgccagtccttctaaaagaactgacgaggtggtgattagtaatgatttgcttctgcgatagctttagtttggtggacagtaccccaagggtgatgaggaggtgaataaatagagtataatcttaaaggaatatcaccagtgtttactacattgtgccagattccggcaggaacaaatatagcactgttagtaaagactggttgttgaaagtttaaacggtccatctggttacccatttgaacaaccccatggccggattcaatatgcaaaaattggtcatcgttaggatgaacctctaaccctatttcgtcaccaactggtatactcatcagagtaagctgtaagttattacctgtccataaggcagtgcgaaatgtgtcattattcatagtggcattgctaatatcaataataaacggatttggaccgtaatcagttgccacatttgattggaagctggagtaggaagctcccgaggtataggaaggcgagttagtatgttgattgttaaacatttttgtctccaaggcgctaatttataatattatatgaaaaaagacgtatttgctcattagaaagaacacagaagtaagacaaatgataagtagctacacatcgaactgaaattttaagaagtatgaaaaagcagaacccattgtcccgttgctaacggactaagcgaagatgagatacagcaggtgctgcagtatgccatacatgatagtatctggaaaggcaatatccggagcacaaagaaacttagggagaaatttgaggtgctatttacacaaagccaaagaaggcgtggaacagattatgatactattggaattcaaaatcggacagatgaggagcggtctcggaaacttgataaacaattgatacaattttcaaacaattaaaaaatgccaatgaataatcgggaaacgagaggtggaggtgatgattatccagggaatacagaataaggaagggcatgatttttagaccttcgacaggaggtcctttgataggatatttggataaatgccagatatcagctattccgcattctgccgctttttaaagcgggcatctaaatggatgcatatagcaatgatcgtggtcatgaaggaataacgtggttttccatggagtaccatccggtgaagaccataatcattcaggatgccaggtcaataaaagcccggatcttccggttctttagtaacgtgtaggcaggaaggttatccatggcggagtccaggcacatgtttttcatggaaaagccaggcatgtttttctccatttcatgaaaagcgaccagaaagttgacagaatcatggcgtttcgcactggtaaagcgcaggagcagcggaaggtcaatcttcagggaactgttatgtcaggacagatggaaaagtgtatatccataatagtatttatccaggtcgctgtcccagccccaggaagcatcggggtcggaataatgacgggaggagccctccggggaggaaggatctaagcggtgtcctctgggggaagcgtgggtatgtactgcggtaccgtcgccggaaacagtaaggttatctgaagggataagcccctgctgcatggacggaaggacggctgcagcgtaaaagaactgctgaagcctttcctcgaagttgaaagggatggatctaccatccaggagacgttctgcaatacactttacgatgccctggcgggattcagaggctttctgatgtttcccttttggcctgtccgtttttctggaattccaggaagcaggaaagagcctgtgccgggaatagcgggttgtatccaggtaaacccaaaggcggtcaatcaggtcgtagtaagagccgagcggcgggagacggtcagggggacagccgatgaggacagcgaggaggcggtcctgccggagcctggcagcccaggccgtgggggaaagagaggcaaggcccttggaaacaagcagaaagaacaggacaaaagacctgagaatctgcggctggttgatggcagggcgccccataggtggataaaaagcggagagataatccatcgctttatcggtgtcaaagagccggagtttttgccatggttcccagagttctgagtgcagcctgccccgttcagaaatttgtttgatatttattaaacatcagctcttcctgtacctgatggcaattttgcctgggttcagtgcctgtataggaaccgtaagcgctccggttatcaccagcggaatcttcgttacaaagcattacgcggaaatctatggattcctcagtcttttccccggcgtgggatatgccctgggcggtcctctgattgcgccggcctatgatatgacgggctcatacaacattgcctggatcattgcggcagccctctccattgccatgacagctttccttttgtactcctacagggtcagccgcatatgcataaagggacaggaagaaacaggaaatacggcaaaaatacagtataataacgggaaaatgcgttaaaaattaaacacattttacttgtcgactgaaaatgttaagtgtgatactatgaaaatagcacaaagcagaactgatataaatgcttttgttgataaatttatataatcggatgatggattcgggagagactgcacaggcagcgccgaaggggaagcgaagaactctcaggcaaaagaaccggatactggacgaaactctggaaagcgatagcaccgacgaagccaaatctttcaggtacaaagacagagcgcatgaacatttttttgttcgtgcgctttttttgatatccgggccatggacacagggcatgtatatatccggtccggtcttaaaaaaagcgcacggtacaaatggggaggtggtatggtttcggaggcagaagcagggcagattgataagaccgtgatgaaaaataaaaaggagggtataaccaatggttgaacaggtaatggattttattgagggatatgacaaagagataggggaggcaatcaaggcggagtgcggatgccagagaaggaatctggagctgattgcttccgagaacattgtatcggagccggtgatggctgccatgggcacggtgctcaccaacaaatacgcggaaggatacgcgggaaaacgctattacggcggatgcgagtttgtggacgtggtggagaccattgccattgagagggcaaagaagctgttcggatgcgactacgtaaatgtacagccccattccggagcccaggccaacatggctgtgttcgttgccatgttaaagcccggcgacacggtcatgggcatggacgaggacgccttaagggaactgttagacgacacggcatcctgcttctatgtgcagcagcctaactactatggtaatctggaggaatgcggcctgttgggagaaatcacccatgaaaagggagccaaatatatcatgggctgcaaccccatctccctggatcttctgcccacaccggcggaatgcggtgcggacatcgcggttggagacggccagcccctgggcatgcctctctgcttcggaggcccgtacctgggctttatgacagctacatcagccatgggaagaaagcttccgggcagaatcgtgggagagacaagggatgtggacggcaagagagcgtatgtgctgaccctccaggccagggaacagcatataagacgtgaaaaggcaagctccaacgtgtgctccaaccaggccctctgcgccctgactgccagcgtatatatggcggccatgggaggagaagggttaagaaagacagccgttctctgcacctccaaggcccattatctgaaggaacagctggaacaggccggcctcacggccaggtatgacagggaattcttccacgagttcgtcaccgagggagatacggacagcggccttatcttaaaggctctggaggaaaagggaatcctggggggactgcccttaaatgacagggagattctctggtgcgctactgagcagaaccggaaggaagacatagaccaggcggcccaaatcgtgaaggaggtatgcggggaatgaaattaatatttgaaaaaggaactcctggcagacactgccacctgcttccggactgcgacgtgccggtccacgagataggaattggcagggagaggaaactgaacctgcccgagctttctgaaaatgaaatcagcagacattataccggtcttgcggggcgggcccacggcgtcaacgacggcttctatcccctgggatcctgcaccatgaaatacaaccccaaggtaaacgaggaggcggcgtccctggagggttttgcgggtatccatccgctgcagcctgaacatacggtacagggcgccctcagggtgtttggcctggcggagaagtatctgtgtgaaataacaggcatggaggccatgaccttccagcccgcggcaggcgcccatggggaatttacgggtctgctgctgatgaaggcttaccaccatttcagaggggacgaaaagaggacgaaaatcattgtccctgactctgcccatggcaccaatcccgccagcgccaccatggccggctacagcgttgtcagcattccctccagggaggacggatgcgtggatctagataagcttaaggaggcagtgggggaggacacggcaggtctgatgctgaccaatcccaacacagtagggctctttgacaaaaacatcctggagattacccgcattgtccatgaggcgggagggctgtgctattacgacggagccaacctcaacgcggtcatgggcatcgtgagaccgggagatatgggatttgacgtaatccacctgaaccttcacaagacattttccacgcctcacggcggaggcggtccgggaagcggccctgtgggctgcaaggaattcctgcggcccttccttccgggatttatggttaaggcgtcgggagaagaggaaggttgcggggctttaagctttgtgaaggagccggaatccattggaagggtaaagatgttctatggaaacttcggggaggtggtaaaggcgctgtcctacatcatgaccctgggcagggaagggattcccgaggcatcctccaatgcagtgctgaatgccaactatatgatgaataagctgtcagacctgtataagatggcttacaatgagacttgtatgcatgaatttgtcatgacgctggaggatttgaaacacgatatcaatgtgtcggccatggatattgccaaggcgtttctggattacggtatccatccgcccaccatgtacttcccgctgattgtccatgaggccctgatggtggagcccaccgagacagagtcaagggagacgctggaccaagccattgaggtattccggaacatttatgaggcggcaaaggcagacccggagagccttcaccaggctccggtcaagactccggtccgccggctggacgaggtgaccgcggccagaaagccggtgctgcgctatatgggggagtaagagcaggcaattgatttgcagaacaatacaggcagtgctcaggagcgtgtcggaagggattccggcgcgctccggcggcaataggaggaaaaatggcagatagatttgacttggttatcataggagcgggtcccggcggttatgtggcggcaatcaagggcgccaagctggggcttacggtggcagtggtggaaaacagggaggaagggggaacctgcctgaaccgtggctgtattccggtcaaggccatgattcatgcgtcccagctttacagggagatgaaggagggcggacatttcggcatttttgcggagaatgtccggtatgagtatgataagattctggaatacaaggagggaacgtcaggaagcttaagacagggagtggagcagctctttaaggcaaacggcgtgacgctggttaagggaaccggcgctctgcaggcggacaaaaccgtgctggtgacagggtgtgaaggagaagaggaaagccgggtgttaaaaggaaagcatgtgctgctggcctcaggctcaaagccaatgaacctgcccatccagggactggacctgcccggggtgcttaccagcgacaggctgtttgaactgaagcgtgcgccggaaagcctgctgattatcggtggaggcgtgatcggagctgaatttgcctctgtattttcatcccttggcatccgggtgaccatagcggaggcccttccaaggctcctggcagacctgggtcaggacatttcccagaacctgaaaatgattctcaaaaagcgtggaatcaaaatctatacaggagccacggtaaagaggattgaagagacgaaacatggtctggcctgcgtcttcgaggaaaagggagaggagaagcgggaggaagcggattatgtgctgtcggccgccggcagggtgccggaaacggaaaagctgctgggaccggggacagagcttgccatggagcggggaagaattgtggtggattccaactttgagacatccatggagggtgtatacgccatcggagacgtgattaagggaatccagctggctcatgtggccagcgcccagggagtatgggtggcggaacacctggcgggaacaggccactccattgatttatccattgttcccaactgcgtgtacaccagtcctgagattgcctccgtgggacttacggaggacgaggcggcccaggctgggatacctgtgtcagtggggaaattcctgatgtccgccaatgggaaatcccagatatccagggaggagagaggcttcatcaaaatcattgcagaagccgacaccaaggtggtgctgggagcccagatgatgtgcgccagggccacggacatgatcggggagatggccaccgcggcggcaaatacggagtgacggaccaggctgatttcatcaacggatgtatggaaataaaaaccctctttacaccggaggaactgttagacggcctacatgaaatcgaggcggcagcgggaaggaagcgaatcatacactgggccccaggacgctggacccggacattattttctattacgatttggtgtatgtatcggaacagtttagcatacctcacacacagatgcacaagcgtgattttgtcctgaagcctctggctgagatagcgccctataagcgccatcccatttatggagagaccgtggctgaaatgccggattcgttttaggagtgtcttacaatgctttctcacaccctttaagcctttaacgccatggaaagaggcttttggaggaccggatacagggcgctggagataatcaggccgctgattccctggatgatgttgctgggaacactggccagggcagcacctaatccgtatagaaagacttcgcacatgcagtatcctccggccaccagaacaatgtcaatcacaccgcagccggctacggcggcatatggattcatccctctggcccttaaactgcggcagacatggcttgccgaaaatgccaccaggcccttgatggcaaaggtgatggggacatagatgaaataacctcccagcaggtctgccatgcaggagccgataccggctgccaggaatgcggatatcgggtccaaaaacacgccgcagagaatcacgatggcgtcgcccgggtggatgtaaccgcctgtaccgggggtggggatgcggatggacatggtggccacgcaggccagagctgcgaacagggcagacaacaccagttttttagtagagaaacgttccgtcatagggatacctccttaaattgaagtacttaaatgctgatacctactataacggaaaagtggactgagcaaaatatccagtttgataatatttgaccagtccagactgggctggctgctgagggagaaatcagacgcggggcggtgaagcgtggaagccggtgtctcattttggcgtctcattctggcgtatcattcaagccagcgtatgatggcagccggatcctcaaaacgatgggtggatgagatgtcgtccggacagtggcagccccacaaagccagacaggagtcaactccggcccgggatgcgcactgcatgtcgtagatgctgtccccgatgtagagaatctgccggggacaggcatcagtgcgtttcatatattcaagcatgggttccggatccggtttgtggcggactgtgtcatcggccgttatgacggtctgaaaatatccggatatctgaaagggaaggaagctgcaggtgtactgaggcattgtcttggaagtgatgatgcccaggctgcagcccttttttttcagaaaatccaacaggggtacaatgccctcatacagataggcggtgtactgatactcctgttcatactgttcccaccggggataaatccggaatatctggtcgggggaatgtatgcccagacgttcaaatgcatccagccctggtatgcccagaaccggcagaagccggcttatgtcccagtgttccccggttatatccctgagagctctctgcagtccgtggagcacggccccggtggtattaatcagcgtgttgtcaatatcaaacacaacatgggtgtagcgcattatgaacctccttcactggcagcctgttccagggactttgccacggcaaacaggcccttttcataatcctgctggtaatcataggacagctctatagacgggattgccttggacggcagataggaaacgcagagacggcggatctcgtctgcttttccctccagcagggggtggcggtagagcacaatcatgtgaggatttaccgtcacggcataaatttgtatcaggcgtgcatatagctcgcttatgttctccgcgggaggcagaccagggccgccgctgtttaactgtttatagacaggcaggaagctgacctcgctgcaatagcctgaggccccggtccacagatgaccgtcaatgaccattccgcctcctataccgtttcctcccatgaagagcgtgaccagggagcctgtatcagggtgcttctgggcccagcagcccatggtcagaaaattcatatcatttcccactgtcatggggatgggaaccagacgccggaaatgctcctccaggttcatgcctttgagtccgctgtactgattggtctcttccaccacaccgtgatttaccagggcggcaatccccgcggcggctgctttcaggcggggataccggttgtggatatcgagaatcagggcatccagctgttccagggacagaatttcaaagggcagacatccctgctccacggtgttctctctcatatccttcagattccagcatacccggtccgactcaacctgtaccaggagatacaggctgaaaaggggattcagttcataaaggcaggcgcacctgcctccggtggatgagccggccccttgttcagtcagttccccatcggagcacagttcatcaatcaggcgtccgaccgtagggaaacttaatcccagctccctggcaatctggcttctggaagcagactcatgtttacccatgtaagctcgtatgcgctctttattcagctgttttacagtgaccggttcttcctgggccatgggaatacccctcctttcatacaattattaacgcactttttaaaattatattaataagttgattctatttaatcacgagacagaggaaatgtcaataagaaaatcttgaaagacttgacaaagaaacggccagcgtatattgttacagggaaaatgtgcaaaaaaagacaggaggcagactgcgatggaacatctcatattcagtctcaatgcgaccatgcccatctttttccttatggtattgggggcgtgtttcagaaaagcaggaatcatggaaggagtctttgtggacagggtcaatcagtttgtgtttaaggtggcccttcccgtactgctgtttgagtgacagcggcgagccccttcctgtttaaggagaagcttaccgcccgccaggtgttctgtttcgttatgtccacactgggactggtgctggtgataggtgtcagcagaggaggaagccgtgagttgattgggattttgttcggcctgggggccgctgtgttttatgcgtcggtggtattgttcaataaaagcatacgtcatgtgtcgggcattaaccggacattttaccagttcctggcagccattttggttctcactccctatgtgtgcctgacaggaggatcccatctttcggaaatggatgtacttggggttgcaaaccttctggtggtgggagtgttccacaccggcatatgttattgcatgtatttttcatcccttcgttatctgaaaggccaggaagcttctattctcagctacatagacccccttgcggccatcctggtatcggtggctatcctgcatgagtccatcactgtgtttcaggcagtgggagggggaatgatacttgggtttacggttgtgaatgaggcgggggaggggacgcggacgtgcatgggggatcgcgtccgtgagaggcgggaacgcagcccgggctgtgaccgtttccgcagcgggacttagtctctccgaactgctccaccccccgccatttcccttttgtgtactccaactggagaccctgcggcagacggcggccctgggaacaggtccgctggccgggaagctgtcgtgggatttctctagttcaagatataattcccccgcatgggcaaaagcattgtagataaaataagataaatcacagtcaagggaaaggggcttaaaatagaactccgcacagttctctaaaaacgggtcagaggcagggtattagttttcactccatttccagagtatgtcccggttcacggtctcgtagaacatcctgcgtatccggacagggtcctttgtctgaccgagtatccacatgattttagtaactactgcctccagggtcatgtcataggcttccagaaggccgaattcctgtttgatgctccggcccacctcatagacggacatgtcgctgccctcgttggtgacctgggttgtcatgatgacggtctttccaaggcctgtccaacgggcgatggcgccgtggtaatccccgtcctggtaggacggcaggccgcccactccaaaggattctatgatgacggcgtcgtaatgctccgccatgtaatccagcagggaagcgtccatggagggaatcagcttcatgagccccacatccccgtccatttggcggtagaagcagaccggctttttgtccctgtccttgtcgtccagataaaatataatctggccgtcctggatgatggccacataaggatagttgatgctggaaaacgcgtgatagctttttgtccactccttctttcccctggtgcctgcaatgaccttgccgtcaaagacaaggttcacgtcgtgggcgccgggacaggaggcaaagagaaggctgtcggccaggttggtcctggcgtccgtattttccatgtcaataggcttctgggccccggtgatgatgatgggctttggcgaatgctgaatcaggtaggacagggccgcggccgtataagccatggtgtccgtgccgtgggtgatgacaaagccgtcgtattggccgtagttttcctcgattgccttttcgactgccagccagtggcagggctgtatgttggtgctgtctatgttcatcagctggatggagtggatttcacagtagcttcggctgtcgggcacataggacaggatttcatccgatgtaatgacgggcttaagccctttatccgtgcgcttgcaggcaatggtgccgcctgttccgagtaagagtatgcgtttcatgttgtaccccctgatcatgtgtatttaagtttatgttaagtataacctgtttgcaaaaacatataataacagcagcggcgtccttaactgacgcataacctttcgtactgcttacaattatattaagaatatgataaatttacaatcccttgattgattttaagtctgactatgatacaataagaataagtaaccaattttctccatattctgtgcagatgaaaggagatttacatgtcccttatttggcttatcgcgtttgtggtttttttggtagtggaaggagttactacatccctgaccagtatctggtttgccggagggtccctggcggctctggtggtgcaggtgtgtggaggcggtctgtatccccagctggcagtgtttgtggcggtgtccttcatgctgtttctcatggtccgtccctttgcgtacaagtacctgtacagcaagcggacaaataccaatgttgacagtctgacaggccgtaaggccgtggtcaaggaacgtattgataatgtggcgggtacagggactgccatcctggccggtgaaacctggcttgccagggcggcgcaggagggggatacctttgaagcgggtgatgtagtgattatatccgctgtcagcggggctaagctgctggtagctgcggcaaagcaggaacatgaagtggaaaaagtataaagaaacataaggaggattcatatgtttggagcaatcggaggatttatcacgttcatcatcattgcagtcattattttattcattctgtccacctgtatcagaatcgtgccccaggctcaggctctggtggtggaacggctgggtgcctatctcggcacatacagcgtgggcattcatttcctggttcccttcatcgaccgtgtggccaagaaggtgaatctgaaggagcaggtggaggatttccctccccagccggttatcaccaaggataacgtaaccatgcagattgatacggtggtattcttctacatcacggacccgaagctgtatgcttacggcgtggagcgtccgctgcttgccattgagaacctgacagccaccaccctgcgtaatattatcggtgacctggagctggatgaaacgctgacctccagggaaaccatcaatgccaagatgcaggagtcgctggatattgctacggacccgtggggcatcaaggtgaccagggtagagcttaagaacatcattcctccggcagctatccaggaggccatggagaaacagatgaaggcagagcgcgagcgccgtgaatctattctgagggctgagggcgagaagaagtccatgattctggtggcggaaggcaacaaggaatccgcggttctgaacgcggaggctgagaaggaagcggctatcttgagggctgaggccgagaaggaaaagaagattaaggaggcccagggccaggcagaggccatccgttccgtgcagaaggctacggcagacggtatccgtttcatcaaggaggcaggggctgacaatgcggtccttcagcttaagagcctggaggcgttccaggcagctgccaacggaaaggccaataagataattattccttcggatatccagggaattgccggtctggttaaatccatcgcagaggtagccgcaaaagatgaggccgcagaataaaagaccgtagaataagcggccgcagaataaaatccgatggacaaaagccggtccatgatataagataggaattggaggcagtacccatcagctgacctaactggtgggtgctgttttattctttatgatttttacgaaaatgtacagacatgaggtgcaggtatggagggaaaggttgcaaagaaaaaccgtatcacggaaggaagcattttcggacagctgctgctgtttttctttcccatattgttcggaacgtttttccagcagctgtataatacggcggatgccatggtggtgggccgctttgtgggaaagcaggccctggctgcggtgggtggaagcaccagcaccctgattaatctgctggtgggtttctttgtgggcctgtccagcggcgccacggtggtcatatcccagttttacggcgccaggaaggcggataaggtccactgggccgtacatacatccattgctttttccgttattgggggtattatattcatgattgtgggtctggtgggatcgccctgggccctggaaaccatgaagacgccggaggatgtcatgggccatgcggtggtgtatatccgcatatatttcctgggtatcatagtcaacctggtttacaacatgggcgccggaatcctgcgggccgtcggagattccagacggcccctgtatttcctcattgccagctgttttaccaacattattctggatgtgctgctggtggcagtgttgcggatgggagtggcaggcgctgccctggctaccatcacgtcccagcttttaagcgcaatcctggtggtccgtgcgcttatgaaaacggacgatatgtataagctggaatggaagaaggtgcgcattgaccagaggatgctccagaggattgtgcgcatcggtatccctgccgggatgcagtccgtcatgtacaatatatccaatgtcatcatccaggccggtgtcaataccctgggaacagacaatgtgactgcatgggccacctacggcaaggtggacggcctgtactggatgatgattaatgccctcggcatatccgccaccaccttcgtggggcagaatttcggggccggccgtctggaccgtgtgcgcaagggcgccggtgcctgcatggtgatcggcgtggtgctgacagcgtccgtgggagtggttctgtataacggcggccatctgctggtggaactgttcaccacggaccggcaggtccaggccatcagcatggatttgctgcatttcatggtcccgacctttattacctatattgccattgagatactttccggtaccctcagaggggtgggagacgcgtggatgcccctcgtcatcacgggcatcggcgtgtgcgcggtcagggtgctgtggattatgtttgtgctgcctcattaccacactatcatcggcgcggccttctgctatccgctgacctggagcctgaccacggtcgcctttgtgatttattattacattttcagcagcctcagacgctggaagcttaagccccttaaaaagcggtttggcgtgtataagcctttttgatatgggaagactttctgtataaaatgacaggaggtgcctatatgaccacaagggaagtcatgtttgattcggtggaggatgtaaaacggtttgtccagcagagcgagaagcagccgaaagatattgacgtgtgctgcggcagctgcatggtggacggaaagtccatgctgggaattctcagtctggggattcataaaaaattgaatgttgtgattcatgactgagaggtgaaaggacgttccggatacagggcgtccttttttgacgggcgttcctgcctcactggttttacctcactgctgtgctttattgatttacttcgctgatttgaaaggaaggttttacaatgaaccgttcctgtgatacaatagacactaaatatatttttacaggttggactttcaggattaacagaccgtaaaggacggaggctaaatgcatgattcaggatattgcaccgcatacatatgaccctgtattcaggaggaagaaaccggaagacagggattatctgcttcactacgaatataataaggtaatgcttctcaaaggcgaaaaggggagtgcgatccctaccttcggggaattgagagaggaaggggaattttcggaacaggcacagtaccttttttctattgatgacagggcctattactgtgtgacggacatggcggtgccggaattcgggggtttttacatggagcctctgactgtgttccggaattttgaaccccttcaccaggcgtttgcggggataacgggcagccagctctaccggtggatgcagagcaggcggttttgcggctgctgcggctcgaagacagaacccagcgccagggagcgcgcccttgtctgtccttcctgcgggcagacggaataccccaagatcagtccggctgtcatcgtggccattaccaacggggacaagctgttaatgtcgcgctatgccggaggcgcttaccgcaactatgcgctgattgccggattcgtggaaatcggagagacctttgaggactgcgtccgcagggaggtcatggaggaagtgggccttagggtgaagaatatccgctactataaaagccagccctgggcattttccgatacggagatggtgggatttacggcggagctggacgggaatgacaccatatgcctggaggaagaggagctgtgcgaggccggctggtttacacgggatgaaatcgtggaatacggtccctgtatcagtgtgggacacgagatgatgaaggcgtttaaggatgggaagatatagcaggcagccacataaaaaaggagaagtgaccatgaaccgtaaggattatattttatttgacttggatggaaccctgacagaccctaaggagggaatcacaaaatcggtacagcacgcactggcgcatttcgggatacagacagatgatctggacagtctgacgcccttcatagggccccctctgagggacagctttaagaagtattacggcttttccgatgagcaggcatgggagggagtacaggcgtaccgggagtatttcagcgtcaggggctgggttcagaataaggagtatcccggcataaaggaaatgctggaagccttaaaggaggcgggaagggtgctgctggtggccacctccaagccggaggagtttgccaggaagatactggagcactttgacatggcggactatttcgatttcatcggcggagccgatatgggggaaacgcgggtgcgcaagggggatgtaatccgatatgtgctggaacagtgcggcctggagccggacgatgagacaatcggacgctgcatgatggtaggggacagggagcacgatgtcctgggggccagagagtgcggcatggaatgcgtgggcgtgctctacggatatggcgaccgccaggagatggatgggtgcagacctgcctggattgcggggacggtgaaggaattaagggatttgctcctgtcactataacttgaactcataataaccattcctattatgcaattgacaaatagaataatggttgctatgattgaaattactattaagaaggcagctgcttttgcgcttgccgtcaaatgagagggtgggattagatggacgacagaatcgtgttatcgctgcttgtggacaataccgcaggtgtgctggcccgtgtagcagggcttttcagccgccgcggatacaatattgagagtctgactgtaggtgtcaccgctgacccgcggtactccaggatgaccgtggtttccctgggagaccagaccgtcctggaacagattaagaaccagctcaataagttggaggatgtaagggatatcaaggagctgcagccggaccgttccgtatacagggaactgatgatggtgaaggtgcgtgccaatgccagcgaccgccagtccgtcagcgccatatccagtatcttccgcgccaccattgtggatgtgggaaaggattcgttgacagtcatgctgacaggagaccagtccaaactggatgcgcttattaacctgctggaggattatgaaatcctggagctggccagaaccggtcttacgggactggaaagaggcgcggaggatatcaggatgcttccataaaacagaggcttaaggggcggccaaaggcggacagagagtcgtcggttttgttgccttaaacatatatcatttaagatttaagttcaaaggaattgaaggaggaaaaaagcaatgccaaagatttattatcaggaagattgtaatttgtcattactggagggcaagaccattgctgtgatcggttacggcagccagggacatgcacatgctttaaacttaaaggagtcaggatgcaacgtaattgtaggcctgtatgagggcagccgttcctggaagaaagcagaggagcagggattcgaggtatatacagcagctgaggcatccaaaaaagcagatgtcatcatgatactgatcaacgatgagaagcaggccgccatgtataaggagtccatcgcgccaaacctgcgtccgggtatgatgctgatgtttgcccatggtttcgctatccacttcggacagattgttccgcctaaggatgtggacgttaccatgatcgctcccaaggcgccgggccataccgtgagaagcgagtatcagaggggcagaggaaccccatgtctggtagctgtttaccaggatgccacaggcaaggccatggacatggcgctggcttacggacagggaatcggaggcgcaagggcaggtatcctggagaccaccttcagagtggagaccgagaccgacctgttcggcgagcaggcagtgctctgcggcggcgtgtgcgccctgatgaaggccggatttgagactctggttgaagcaggctatgctcctgagaatgcatactttgagtgcgtgcatgagatgaagctgattgtggacctgatttacgagagcggttttgcaggcatgcgttattccatttccaatacagctgagtacggcgattatatcaccggaccaaagattgtgaccgacgagacaaagaaggccatgaagaagattctgtccgatatccaggacggttcctttgcaaaagagtggcttctggagaaccaggttggctgcccgcatttcaatgccatgagaaagaacgaggcagagcagccgcttgagaaggtgggagctgagctgagaaagctttacagctggaatgatacggacaaactgattaacaactaattgattcacaacgaacgctgcgttgattgtattcgggaagattggcggatacaaggaagaacaggcggaggccccggaaggaaaccggggaatccgcctgttttatatatgcagaatatgcatattcggagtatcagtacagaaactccaggaatgttttcagggccatggcctggttggaagggtgataggcgaagccgatggtcctgcggtggatggggatatacaggggaatctctaccagcaggccgctgtccagctccttctgcaccaattccttgatgacacaggcaatgcccaggccaattttggcaaattcaatcagcaggtccatggtggtgacttccagaatctggtggggacagatgttgttttcctccatgtattcgtccacatggtggcgggtcatgttgctggtgtcaagaagcatgatgttgcccgtctcaaacaggctggtatcccgcccctctctcaggtacaggttctccagataattgggggtggtgacaaaggtgtcctggatatccatgaccgggataaaggccaggtcacggcggaccgagggctcggcaaccaggcccaggtcgatcttctgctgctccagccggccaagggtctgggctgtggcctggctttctatggtaaccttcatgtgaggatactggtcgatgaaggtcttcaggtagggaagcaggatatatttgcacagagtgttgctcaccccaatccgtaagtggccgatgtcgaattcctgaatccgcttcagttcctgttcgccccggtccagggcgtcaaaagcctccctggtatgttcaaatagaatttcaccctcagaggtgagctgtactccgcgggagcttcgggtaaacagggacaggccaaggctgtcctccagcttgctgatggccttgctgatggcgggctggctgatgtaaagttcctttgcggccttggatatgttgccggctttggccacttcataaaatatcttgtattgggacaggttctgttccatggaatccccctcctgctatataacattttttcatatatcccattcatattatgtatttttattataacaatacatatgctaaaatgtaaagcacggatgatataatttcgaggaattattaaagagaaggatattgaaggaggaaataagttatgggaatgaccatgagccagaaaatcctggctgcccacgcaggacttgaggaagtgaaggcgggacagctcatagaggcggatttggatttagtgctgggaaatgacatcacttctccggttgccatcaacgagatgaagaagatggacagaaagaccgtgtttgataaggacaagattgccctggttatggaccattttatccctaacaaggatataaagtcggctgagaactgcaagtgctgcagggagtttgcctgccgccatgagataaccaattatttcgatgtgggagagatgggaatcgagcatgcccttcttcctgaaaagggactggtggtggccggtgacgcggtcataggcgcggactcccacacatgtacatacggagcgctgggagcattttccacgggggtgggaagcacggatatggcagccggcatggtgaccggcagggcatggtttaaggtgccctctgccattaaatttgagctggtgggcaagccctccaagtgggtcagcggcaaggatgtaatcttacatattatcggcatgattggtgtggacggagccctgtataagtccatggagttcgtgggggagggaatcaggaacctttccatggatgaccgctttaccatctgcaacatggcaatcgaggcaggaggaaagaacggaatcttcccggtggatgaactggccgccgaatatatgaaggagcattcaaagcgcgggtttaccgcatataaggcggatgaggacgcggagtatgatgagacatatgtgattgacttgtcccagttaaagcccaccgtatccttcccccatcttccttccaataccaggaccattgaccaggcaggggatgtgaaggtggaccaggcggtcatcggttcctgtaccaacggacgtatagaggacatgagaatcgcggcggaggtattaaagggcaggaagattgccaagggtgtgcgctgcatcgtgataccggctacccagtccatctatcttcaggcaatgagagaggggcttctggagattttcattgaggcgggagccgtggtgagcacacctacctgcggtccgtgtctgggcggctacatgggtatccttgcggccggggagaggtgcatctccacaacaaaccgaaactttgtgggacgtatgggacacgttgattcagaggtatatctggccagcccggccgtggctgccgcaagtgccgtggcgggaaaaattatctgcccgtgccggctggattaacggaataaatgcaatatcattgtgaaaggaaaaggagactgaacatgaaagcatgcggacacgtttttaaatacggtgacaatgtggatacggatgtcatcatcccggccagatatttaaacgccacccagggcgacgagctggcaaaacactgtatggaggatattgacagggagtttgtgaataaggtccaaaagggggacatcattgtggccaacaagaatttcggctgcggttcctcccgggaacacgcgcctctggccatcaagtgcgcgggagtgagctgcgttatcgcggagacatttgcccgtatcttctacaggaattccataaacatcggccttcccatcattgagtgcctggaggcggccaggtccattgaggcgggggatgaggtggaagttgattttgacagcggaatcatcaccaacaagacaaagggagagacctatcagggccagtccttcccgcccttcatgcagaaaatcatatcggcgggcggcctggtgaattacattaacggacaatagaaaagcaggaaagcagcccatgtgcggcagggagaacatgctcccttcagaattaaattctgacgcgccgggctgcttttttggggtttaactcctggccagacgtatgaacgcgtccatctctctggtgacccacttatccttgtggtaaacaatctgacgccaggtcctcatgtagaaatccctgacatccaatacggccagctctccgctgataatatccctgtgtatggtgaattccggaagaaaggaaacacccaggttctttctcagcaggttgatgataaattccgtgttccctatctccagaaaggggtgtatttccttgccctgggcagccaggtactggtccaggataaaacggtagctggcgtttctctcggtgaggatgaagggctggcctatgacctggtccaggtccaggctgtccctccccacaaaggggtggccggaggcggtgacaaacacaatgtcctccggttcctccaggacttttatccatttgctgtcatacatacgcttatccaggaaatacactatatcaatggcattgctgttcatcatctccaacagtgtctcaggggagtcggtgatgagccttatgttgaccttggggtagagcctgtggtattcccttaacagctccgggaatatggtggcgcaaatggattcaatggtccccagacacaggcttccggtaagctctgaaacatgggtgaccgcgtccctggcgtgttccagctccttcatgaccgagaccgcgtgttcgtaaaacagggctccctgatgggtcagggtggtctgtttgccgatgcggtcaaagagatggacgttcagctcctgctccagctgtttgatttgaatggtgacagctgcctgggaataacccagctgtctggctgccttggaaaagctctttaactgcgctacctggataaaggcggcaatctcccgtagctccatatgatgtgattcctttgctcattttgtataaaaatttttaaatgatatcataaaaacattaaattttacaaccatatgcttttatggtacattaatattaatcagaaatcaatccaaaatgtatagtaattttccggataatcaattaaaattgagaaaggtatcacaatcatcatggaaaaaacaaatgttaagtacggagcgtatgttcaaattctgaaggaggagctgcttccggccatgggatgtacagagcccattgcccttgcctatgcggcggccacggccaggaaagtgctgggggagctgccggaccgtgtggtggtgggagccagcggaagcattatcaagaatgtgaagtcggttatcgtgcctaacacgaatcatctgaagggcattccggcagcggcagcagcgggaattgttgcgggagattcggacaaagaactggaggtgattgcagaagttacaccagatcagaccagacagatgaaggaattcctggataacacggaaatcagggtggagcatgcggataacggcattacctttgatatcatcgtgactctgtataagggggattcctacgcaaaggtccgcatcgccaattatcataccaatatcgtgctgattgaaaagaatggggagattcttaagcaggtagaggtggcaggcgaggaggagggtctgactgacagaagcctgctcaacatggaggacatctgggattttatcaatacggtggacatcggggatatacgggaagtattggaccgccagattaagtacaactgggccattgcccaggagggattaaaaggggattatggcgccaatatcggctctgttcttttggaaatgtccggaaatgatgtccgcaccagggcaaaagccatggcagcggcaggttctgacgccaggatgaatggctgtgaactgccggtcatcatcaattcgggaagcggaaaccagggtatcactgcctctgttcccgtgctggtatatgcggaggaatttaaggtggatgaggataagaagtacagggcgctggctctgtccaacctgacagccatccatcagaagactcccattggcaggctttccgcttactgcggggctgtcagtgccggtgcaggcgccggtgcagggattgcttacctgtgcggcggcggtttcaaagaagtcgtacatacggttgtaaacgcccttgccattgtgtcgggcattgtctgtgacggagcaaaggcttcctgcgcggccaagattgcctcggcagtggatgcgggaattctgggctacaacatgtatatacgcggtcagcagttttacgggggagacggtatcgtcaccaagggtgtcgaggccacacttaagaacgttggtcgtcttggaaaagaagggatgaaggagaccaacgaggaaatcataaaaatcatgattggagaataagtatgaaaaaaataacaggcagtttaccgtttcggttgcttttgggcgttatcctgggcatcatagttggtcagttggccgggagcggccttatgcatgttgttgtgacaatcaaatacatcctgaaccaggtcattgttttctgtgtgccgcttatcatcatcggattcattgccccttccatcacaaggctgggcaacaatgcatccaaaatgctgggagtcgccattataattgcctatgtttcatctatcggtgcagcccttttttctatgacggcaggttttcttatgattcctcacctgtccattgccactgaggtggaggggttaaaggatttgccggaaatcgtgttccagctggatatacctcaaattatgcctgtgatgagcgccctggtgttctcactgcttctgggcctggccgccacatggaccaaggccgcggtgattactcaggtgctggaggagttccagcagattgtgctgtccgttgtcaccaaggtggtaattcctatccttcctgtgtttatcgcgtttacattctgtgccctttcctatgaggggactattacaaaacagcttcccgtgttcatccaggtggtcatcattgtcatgattggccattacatctggctggccctgctgtatgccgtcggcggcgcctattcaggcaagaatccgctggatgtcataaagaattacggacctgcctatattaccgcggtgggtaccatgtcctcagcggctacactggctgttgccctgcgctgtgccaagaaatcacagccgcctctcagggatgacatggtggacttcggcatcccgctctttgccaacatccatctgtgcggttctgttctgacagaggtattctttgtgatgaccatatccaagatcctttacggaaccattccgtccctgggcaccatgattttgttctgcgcccttttgggtgtgttcgccatcggagcgcccggtgttcccggaggcacggttatggcttccctgggtctgattacaggcgtattgggatttgacgaaacgggaacagcgctgatgcttaccatctttgcccttcaggacagcttcggaaccgcctgcaacgtgaccggtgacggggccctgaccatgattcttacaggctttgccgagaaacacggaatcaagaggcagaagattgaaagcgggctgtgacgggtctgcatatttataagttttactaatatgaatatagcgatttataataaaaacaaaattactcttgaacctatagcggctataggatatataataggttcaagagccaagcggaaaggaccggctggcaaagccggtcctttttgcagcatgatatttccgaaagagaggtaaagaatggacaaaaagattcttattaagaatgccagggcaatcgtgtcctgtgacggggaagaccgggtttacagggacgcggacatgctgattgaggggccgaagatactggcaatcggcagggacctgatgaacggaggggacccggcgtcaggaagaaatctgaatcaggaggaggtccaggtcatccgggcagagggaaaattcgtgtatccgggcctgatcaacacccatcatcattttttccagacctttgtgcgcaatctcatgaccattgactatcccaacatgatggtgatggactggattgataagatttaccgcatattccagaacattgattccgacgtgatttactactccacccttacatcctttgcggatttgatgaaacacggctgtacctgcgcctttgatcaccaatactgctacaccaggaagaccggcaagtcaccggtggaccgtcagatggaggcggcagagcttttgggcatccggtaccacgccggaagggggaccaacacccttcccggaagtgaaggaagctccattcccgacaatatgctggagacaacggatgagttcttaaaggactgtgacaggctgattggactgtatcacgattccgggccgttttccatgaggcagatagtcatggcgccctgccagcccattaactgccgcagggaaacctttgccgagaccgtggccatggccagggagaagggggtcaggatgcatacgcatctgggcgagggagagaacgagggcatgatggcccgctggggcaagcgcaccatggactggtgtggagagatgggctttatcggagaggacgtgtggtacgcccatgactgggaagtgacaaaggaagagtatagggtcctggcagccacaggcacaggggtttcccactgtccggcgccggccgtacttggcggcttcccgattctaaatataaaggaaatgcgggaagcgggcatccttgtgagcctgggatgcgacggttccgccacaaatgacagttccaatctgctggatgccctgcgcatggcttacctgatgcaggcaaaccacaccaaggagagagggggatgcgtctccgcctatgacatgttaaaggtggccaccgtaaacggggcaaagacccttggaagaggcgacctggggtccctggaagagggaaaggcagcggacctgtttatgattgacacagagacactggagctggcgggcgccctgcacgacccgaagaacctgctggccagagtgggactgaccggaccggtgtggatgaccatgattaacggaaacattgtttacaaagacggcatcctgaaaggcgtggacgagagaaggctggccctggagggagaggctgtatgcacaagggtcatccgggagcctcacagcgcgtacagggaatttatttaagggggaatcttatttaaaggggaagccggcagaaaaaaggaaagaaggttggcaggtgaaggaatatttttctatcggggaattggcggagctgttcgggcttaacatacagacactgtactactacgacagcgtcggcatcttttcccccagggaacgcaatgagaaaaacgggcgcagaaagtatgagtttgaccagatatacgagctggcaaccgtgtcctatatgcgccgtctgggctattccctggaggaaatcaaggaatccagaaccagcttaaattccagcagggctgtggacattatgaagcagcgctcccagaagcttcgcaggcagtggcagaagctgctcaacatagatgaggccatccagagaaaaatccggttcatggaacaggagatggatggaatccgtctggatgagattgcggtaaagcattttgaggaccggaggtttatttccataggcgacgaggagctgctgtacagggaaaattccttttatttttatcccaccatcgccttttacgagggagaccggaagtattttggggcctacctgtatccggaccatgaggagataccaaaaaccatacctcagtccagaatccagattatccggggaggcgacttcctctgcggataccatctgggcggatacgagggggtgccggacaccatccggcgtctgagggaggccaggccggaccttgagctgggggcccaggccatcaattttaatattctggatcagttcgtggagagtgacaataaaaattttatcaccgccatgcagattcgggtgttatagattcacatgactgatgatggggtacctaatgaggaaacataaaaaatctaaggaaaaaggaaggataagagacatgaaaaacagaatgcgtttagcggcggcagccctggcattatccatggcaggctttggcctgaccggatgcggcggggaaacaaaggagacagcggcaaagacagaggctgcagataagcaggccgggggcgcccaggcggcagatacccaggcaaatggggaccaggccgaaggcggccaggaggaaggaagccggacagcggacggcaagacgtacaaggtggccctgtgcctgtccggcgcggccaatgatatgggctggtgccagtcagcctatgacggccttaagcttttagaggcggattacggctgtgaggtgacctatacggagaacctgacaccggatgacattgaggctgcttttgcggattatgcggccagcggatatgacgtggtcatcggtcacggatacgagttcggagatccggcggtggacgttgcggagcagtatccggatacaaagttcattgtaacggagggagaggtgtctgccgacaatgtggcctcctatgtgtcaaagtgtgaggaaggcggatacatcatgggaatgctggcagccggcatgtccgagagcggcaaggtgggctttatcggaccgattcagggcgcgtcccttgtgaagattatgaacggatttgaggacggggcaaaggaagtaaaccctgacatccaggtacagaccgcatggaccggttcctttaccgatacggcccttggcaaggaggccgcccaggccatgattgataatggcgcggatgtaatcggacactgtgccaacgagtcgggaacaggagccatcaatgcggcaaaggaagcaaaggtctacgccacaggcgactcctatgaccagaatgatctggcgcccgacaccatcctttcctcatctgtttaccacattcctcatgtgattgaggttgcctttaagacggttgcggacggaacctttgagggcggcatctaccagctgggaatggcagacggggcagtgagcgttgcgccttaccacaatctggattccgctgttcccgatgagctgaagcagaagatttccgataagattgcggcaattgagtccggaacgtttgaagtgacatgtgataccaagcccagaacataagatatttcctgaaaggggcctgcatcaaaccaaccgcagctctgcgtgtccgggggtgcgggccctgtttggaaagaaaggatggaacagatgccattacttgagatgaagcatataaccaaatcctttgcaggcgtgtatgccaacgaggatgtggacctgtctgtggagcagggggagatacatgcgctgttaggggaaaatggggccggcaagaccacccttatgaatattctgtttggcatttatcaggcggacaggggggaaatctgttttaaaggccataatgtggaatttaagtcgccgggggaggcgattgccaggggaatcggcatggtgcaccagcatttttccctggtgaagaaaatgacggtgctggacaatgtgatgctgggattaaagggggagggcatcatggcggaccggaagtcggcaagggaaaaactgacgggccttgccgcggcctacggtctcccggtaaacccggaagcccctgtccacaccctttccgtgggagagcagcagagggtggagattctcaaggctctgtaccgggatgtgagcctgctgattctggacgagcccaccggcgtactcacgccccaggaaacggagaattttttcggggtattaaaacggctgcgtgacgagggttatggaattattatcatcacccaccggctgggggaaatcatggatatcagcgaccgggtgacggtgctgcgcgacggccggaaggtcaggagcctggtgacaaaggagacaacgccggaggagctgtctgcctgtatgattgggcgggagcttaagacggaaagagagataagggaatccgctgccggggagacggccttaagccttaaggatgtgtgtctccacaaaaagcacagcaccaagatgtctctggaccacgtaagccttaccatacgcaggggagaaatcctgggaatcgcgggagtggaaggcaacggacagaaggagctggccgaggtaataacaggaatccgcaggattaaaagcggacagatggaataccagggaaaggatatacgaaaggacagtgtaaaggaacggttccgggcgggtatctcctatatttccgatgaccgtcacggcgacagcctggtcatggacatgacggtggaggacaatctgattttaagggactttgacagggaacctttttcaaggaaaatggtgctggactacagacaggcggagaagagagccagggaggccctggatgaatacagcatcaagacctcgggcaaaagcggcatcaaaacaccggtaaagctgatgagcggcggtaaccagcaaaaggtcatactttccagggagatatccggggaagccggcctgattgtggccagccagcccacaaggggactggatatcggagccacccggtttgtccatgaaaccctcctcaggcagagggatgcaggcagatgcgtcctgctgatatcggctgacctggatgaaatcctgggggtaagcgaccgcgtggcagtcatgtatgagggccgtatcatagggatcctgaaccgggaagaggcggatgtacataaaattggcctgctgatgggcggtattgctaaggaggcggcaaatgaataggaaatcaaaaatatttgagacagcaggcatcggactcatcgcagtggcagtgtggacggttctcatcatgctgtcagacgcaagcccggcagaggcttatgccatgttctttaagggcatatttggaaacttaaacgggttcatggaagtgtttgtaaaggcagcccccctgatttttacgggtctgggatgcgcggtggcgttcaggaccggctttttcaacatcggcgcggagggacagttttacataggggcccttgcctcggcgtgggcggcccttacctggaccgggattcccggcgcgctccgcatcctgtgcgccattttgatgggatttgtatttggtggtctctgggctctgatagccgccatgtttaaggcaaagctggggatatcggaaatcattgtaaccatcatgctgaattacattgccatcaatttcctgggcattgcggtcaggaccttcctcatggacccggcaggaagcatacctcagtcgcccaagctggacccttccgtcaccctttaccggttcttaaagcccaccaggcttcacgcgggatttatcattgccgtgctcatggtgttccttgtctggttcatcctggaaaagacaacggtgggatatgaaatcaaggtggtgggattcaacaagcgggcagctgcctgcaatggaatctctgttgtcagaaacatcatcatttccgcgttcttaagcggcggactggcgggaatcgcaggagccgtggaggtcatgggagtgcagagaaagcttctggagggaatctccggggagtgcggatacacagcggtgctcatcgcccttctggcctccaaccatcccctgggcgtactctttgccgccatcgcctttgcggccctggaggtgggagccaattccatgcagaggcagatgggagtgccttcggccattgtcaatatcctggtggggctgattgtgctgctgattctgggcagggagctgttttacaggaagagaaaggaggaaaaaccatgttagagcaaatcatgaccattggttttgtgacggcctttctgacggcgtccgtaagaatggccgtgcctctgatttacgccggactgggggagaccatatccgagaaggcgggaatccttaacataggcatggagggagtcatgctgggcggagcctttttctcctttgcgggaaccctttattccggcagcctggccgttggccttttgtgcggcatggcgggcggggccatggtcagcgccatccacgggctgctgtccatcaggctggcccaggaccagtctgtcagcggaatcgccatcaatatatttatggccggagtcaccagctttctctataaactgatgtcaagcggccggtcctatcagcagattgaaccctttgcaaagcttaagataccctttctgggggatatacccctgataggaaacgccctgttcaaccaggacatactgacatacggggtctatgtgctggtaatcctggtcgctctgttttacagcaggacgtcaaagggaatggcctttgccgccatcggggagaatcccagggctgcggattcagccggtatacccgtacaccggtaccagtgggcggctgtgctgttaaacggaatgctgggagggctgggaggcgcctatctggttctggtgcaggtgggtaatttttctgagaatatgacatcaggcaggggatacatagccctggcggcagtcatattgggccggtatgtgccctttggaatgatgggcgcggccttcatattcggcgcggccaatgcccttcaaatccgcctccaggccatcggagtgcccctgcccacacaggctctggccatgctgccctacatcataaccctggttgcccttctgggctccatcggcagaaacagcgcgcccgaggcattgggtaagccgtatataaggggagccaggtagatttccggaataatgattgacagtccccctggcctgtagtaagataagaaaaacggatgtgcgccacggtacatggtaccggtatctgcgctgacaggcctgtcttacggccagggccttacagcaaagagacggcagcaaatcccatatcaggatatgtgattgactgacctgaagcaaggctgaaggggaaggcggggacacagatatgacagtatgttcaggatacgcctttttggcgtatccttttttcagttatcgggaggtatcatatggagacaagaatcgcggtaatcggcataatagtggaaaataaggatgcggtggaaagcgtcaacgatctgctccaccaatacggtcagtacatcattgggaggatggggcttccctatgaaaagaaaaaggttaacattataagcgttgtggtggatgcgccccaggacatcataagcgccctgtccggcaaactgggcaggcttcagggcgttaactccaaggccctgtactccaatatcggtagttgataaaactatataaattatctggcggggaagtgttaccggaggccgccatggccatggaccctgacccggcaagaaaaggagaggaagaacatgaattacgacctaaaatcatcccgtgcagaggaattcattcaccacggggaaattgaggagacccttgcctacggggaggcaaacagcacaaacagggaactgattgacgagattctggcaaaggccagggagcgcagggggctgacccacagggaggccatggtgcttctggactgcggactggaggacaagaaccaggagatttatgagctggcggaacagattaaaagggatttctacggaaaccgcattgtgctgtttgcgcccctgtacctgtccaattactgtatcaatgggtgtgtgtactgtccctaccacgccaagaacaaacatatcccaaggaagaagctgacccaggatgaaatccgcagggaggttatggcgctgcaggatatggggcataagcgcctggcccttgaaacaggggaggacccggtgcacaatcccattgaatacatgctggagtccattgacaccatttacagcataaagcataaaaacggcgccatacgccgcgtcaacgtgaacatagcggccaccacggtggagaattacaggaagcttaaggacgcgggaatcggtacatatatcctgttccaggagacatatcataaggaaagctatgaaaagcttcatcccacagggccaaagcatgattactgttaccacacagaggcgatggaccgtgcccaaatgggcggtattgacgacgtgggctgcggcgtgctgtttggcctggagctttaccggtatgaatttgcgggacttctgatgcacgcggagcatctggaggcagtgttcggggtgggaccccataccatcagcgtgcccaggatacgaagggcggatgacattgacccggattcctttgacaatggaatcgatgacgacaccttcgccaagctggttgcctgtattcgaatcgcggttccctacacaggcatgattgtttccacaagagagagccagaaaaccagggaacgggtgctgcacctgggcatttcccaaatcagcggcggctccaagacaagcgtgggcggctactttgaacctgagcctgaggatgaatgttcggcccagttcgatgtaagcgacaaccgtaccctggaccaggtagtgaactggctcatgggtatgggatatattcccagcttctgtacggcctgctacagggaagggcgcacaggcgaccgtttcatgtccctgtgcaagagcgggcagattcaaaactgctgccatcccaatgctctcatgacgctgaaggaatatctcatggattacagttctgaggagacaaggcgcatcggcgaggcgctcatagagaaggaaatcggaagcataccaaaggagaaggtgcgccagattgtcagggataacctggtaaagattgaacagggcgtcagggatttcagattttaaacaggggaagaggagcggatgaccatgggaatgaacaatacgccggcatcggaccggatacatattggattttttggaaggagaaacgccggcaaatccagcgtgctgaacgcggtcacgggccaggatctggctgtggtgtcggacgtgaagggaaccactacggaccctgtttataaggccatggagctgctgcctctgggccctgtgatgatgattgacacgcccggcattgacgatgagggccagttgggaagcctgagggtgaggaagagctatcaggtactaaacaagacagacgtggctgtgctggtgatggatgtctgtcacggcccggcttcggaggactatgccctcctggagaagataggggaaaaacagattccctgcgtggcggtctgcaacaaggcggatttggacggaatttccggtcagagaccggaggggattcctgactcggttcccgtcctgtctgtcagcgcccataccggtcagggtattgcggcgctgaaggagtgtctggcgcagctgggcaggacccaggagaacagccgcaaaatcgtgggagatttgctttctccatcggatctggccgtactggtggtacccattgacaaggcggctcccaagggacgcctgattctgccccagcagcagaccatacgcgacatcctggaagcggatgcagtgtccgtggtggtcagggaaaacggactgaaggacacgctggcatctctggagaagaagcccagaatggtcatcaccgacagtcaggtatttgctaaggtcagtgcagatacgccggaggatattctcctgacttccttttccattctctttgcccgctataaaggcagtctggagcccatggtgcagggcgtcagggctctggacagcatcagaaagggagacagaatcctgatttctgagggctgcacccatcacaggcagtgcgaagatatcgggaccgtaaagctgcccaagtggatacgggagtataccggaacagaaccggagtttgtgtttacctcaggtacggagtttccggatgaactggctggctatcatctgattgtccattgcggcggatgcatgctgaatgagcgtgagatgaaatatagaatgaaatgcgctcaggaccagggaattcccatgaccaactatggcataaccattgcttacatacatgggatattgaggcggagcgtggaaccatttccggagatagcggcgctgctggacggcagccgggaaggatgagggcggggagtctgaatcaggatgcgtcataaccggacggttgggaaatacggataagtgatataaggcaggggctgtgaatcatattttatgtgacacaggctcctgcttttttgcacttttttgcgccctgtatatactggagattatagataggcattttgaattaaaaaaaatatttttttattttaggaggtatattgaaaaatgtttctaacgtgatatacttataactaaggggaattaatattgagaacatataaatggaaggagaagaaattatgaggattcagggtaagagagtctggatagcaggacagttcatagcagcccagatggagattgaggatggagccatcagtcgtatccatgggtatggtgcgggaccggcggatcaggattacggggataagagaatcgtgccgggtttcattgacatccacacacacggagcatatgattttgatacaaacgacggccggccggagggactccgcaactggatgaagcggataccggaggagggtgtaacagccatcctgcccactaccgtaacccagatgccggatgtgctcaccaaggccgtggccaatgtggcagccgtggtgaaggagggctacgaaggagcggaaatcctgggcattcattttgagggaccgttcctggacatggagtacaagggagcgcagccgcctgaggccattgcgtctgcatccgtggagcaatttaaaaaatatcaggaggcagcacagggccttatcaaatatatcaccctggcgccggagcgggatccggaccatgcgcttaccagatactgctccacccacggcgtggtggtcagcatgggccactcggcagccacttacgagcaggctcttttgggcattgccaacggcgcaacatccatgacccatgtatataacggcatgacgccttaccatcaccgcaaaccggggctggtaggcacggctttccgggtaagggacatctacggggaaatcatctgtgacggttgccattcccacctggctgccctgaacaacttctttacggccaagggacgtgattattccatcatgatcagcgattccctcagggctaagcactgccctccgggaggtgagtaccagctgggcggccatgacattgagataggagaggacggactggcccgtctcaagggaacagataccattgcgggaagcaccctcaacatgaacagagggcttaagattctggtagagcaggcgctggtgccctttgacactgctcttaattcatgcaccatcaacccggccagatgtctgggcgtggatcacagaaaaggaaagattgcagccggatgcgacgcggatttggtggttctggatgatgattacagcgtactccagacatggtgcagaggacgcgcaatgctttgatgcaggaccctgaaccgccgcggttttaaggaaaatttcgataaaatccttgaaaatgcttgcatttacggcggcatgatggtatagtgtatacgataactaatgtagattactgataaaagagtggacaccagtccactctttcgttttggaaagacaggaaaggtggtggaatgatgggaaaaaaggagagctatgagagccgggtggagaaacacctccttccactgatggaagagcatggttttgaactggtagacgtagaatatgtcaaagaagcaggtacctggtatctgagggcttatatagataaagaaggcggcattgccgtggatgactgtgaggtcatcagcagggccttaagcagctggctggacaaagaagattttattgacgacagttatattctggaagtcagttcgccgggactaggccgtcctcttaagaaggaaaaggacttcgtaagaagcatgggcaaggatgtggatgtaaggctttaccgtcagcttaacaagcaaaaggaatttacgggcgccctcagtgcatatgatgaaaatactgtgacgctgaccatggaagacggaaaccagatggtatttgaaaaagcggacattgccctgatacggcttgcgctggatttttagttagatcattcacatgctgagacatggataggaggataaacatgaacaaggaactgttagaggcaatggaggtattggagaaagagaaaaacatttccaaagatacgctcattgaggccattgagaactctttactcactgcctgtaagaaccatttcggaaaagccgataatgtaaaggtcacggtgaaccctaatacctgtgactttgcagtatatgcggaaaaagcggttgtggaaaacgtggaggacgattgtctggagatgagcctggcggatgccaagatgctgaaccccaagtatgagattggggatacggtacagattccgctggattccaagaaattcggccgtattgccacacagaacgcaaagaacgtgattctgcagaagatacgcgaggaagaacgcaaggcactgtacaacgagtattatatgaaggaaaaggatgtcatgaccggcgtggtacagcgctatctgggaaggaacgtgagcattaacctgggcagggtggacgccatcctcaatgaaagcgagcaggtaaagggcgagacattccgtcccacggagcgcgtcaaggtatatgttatcgaggtgaaggatacgccaaagggccccagggtttctgtgtccaggacacacccggacctggtgaaacgtctctttgaatccgaggtggccgaggtccgcgacggtacggtggaaatcaaggccattgccagggaagcaggttccaggacaaagattgcggtgaaatccaatgacgccaatgtggatccggtaggcgcatgcgtgggcctcaacggttccagggttaattccattgtaagcgaattaaagggtgaaaagattgacatcattaactgggatgacaatcccgcgtacctgattgaaaatgcattgagccccgccaaggttatctgcgttgtggcggacgaggaagagcgggaagcccaggttattgtgccggattaccagttgtcccttgccatcggcaaggagggtcagaacgcgagactggccgcaaggcttactggctttaagattgatattaagagtgagacccaggccagggaaatgggactcttcgagcagatggggcttcagtatggcgatacgccgtctgaggtctatgaggaagagacggaggaaacggaaagctaccaggagtatgaagaaaactatcaggaagacggaagcgaacagtaaaagggatactctgagaaggttaggagtgatgtaagtgagcatgaaaaaagttccgctcaggcagtgcattggctgccaggagatgaagagtaagaaagaaatgataagagtcataaaaaccgccgaggatgagattatgttggatgccacaggccgtaagaacggcaggggcgcttacctgtgtccatcaatggaatgcctgaagaaggcagtgaagggaaagggactggaacgttccttcaagatggccattcccaaagaggtgtatgaaactctggaaaaggagatggaagaacttggcagataacaaaaggctgttaagcctggtgggccttgcgacaagggccaggaaggtggtaagcggcgaattttcgacggagaaatcagtaaagagcggaaagtcccatttggtaatcgtatcggaagaagcttcggacaatacaaagaaaaagtttaccaacatgtgtacttactataaagtcccaatctatctgtttggaacaaaggacgaactggggcatgccatggggcaggagttcagggcgtcactgtcagtggaggatgcaggtttcgcaaggtcaatggtagaacgaatgaataaaaacggaggtagcttgaatgagagtaagtgaactggcaaatgaactgggcaagaccagtaaggagatattggaaattattaagacgaaggataaatcagctgtattgtatgcggcatcgaatgtgacaaaggatcaggagaatattgtacgctcttttgcaaatcctaagagggacgcaaaacctgccgcaccggagcacaggactgaggctcctaaaacagaggcttccaggacggaagctccaaggacggaagcgcctaagacagaggctcctaaggcggaggctgccaggaaccaggacggcgggtcaaggggtgaaccggctaagaagaagctgacggccgtgttccgtcctcagaacgcccagcagcagattaagcgtccggttcctccgaagccacagggaggaaaacagggccatacggctcctgccccggccgcagcgcctcaggccgtacatccggcaccccaggcagctttggcagagtctgcaaaaccacaggttcaggctcagtcagcggatacggtttcagagagaaccgcagcgcctcagccaacccaggcaccacaggccggagttcaggcgggagccccgggaactgcccaggacagccgtgatacagccaggagccagggaggctaccagggcagccgcgacaataacagaagtcagggaggctaccagggcagccgcgacaacaaccgcggccagggaggctatcagggaggccaggggggctaccagggcagccgcgacaataacaggagccagggaggctgccagggcagccgcgacaacaaccgcggccagggaggctatcagggaggccagggaggctgccagggcagccgtgacaacaacagaagccagggcggctatcagggaggccagggaggctaccagggcagccgtgacaataacaggagccagggcggctatcagggaggccagggaggctaccagggcagccgcgacaacaacaggccccagggaggcggctatcagggcagcaggagccagggcggctatcagggaggccagggaggctaccagggcagccgtgacaacaacaggccccagggaggcggctatcagggcagcagaagccagggcagctatcagggaggccagggaggctaccagggcagccgtgacaacaacaggccccagggaggcggctatcagggcagcaggagccagggcagctatcagggaggccagggaggttaccagggcagccgcgacagcaacaggccggggggaggctaccagggcaaccgcgacggcgcaaggccccagggcggttatggaaacaggtcccagggcggctacggcgcaagaactcagggaggctatcagggccgtccgggagatgacaaggatgcaagggacaacagaggcaggactgacagccgacgcccagcaggggccagggacgggaagtcatcctttgacaccccaatccagacaaagccaagcagcaaccgccagaataagaatgcccataagaatgccagatttgataagcgcgacaggctggaggacggcaagaagaaagttccgaagacaggaaagggagcatttatcatgcctcagcctaagaaggaggagtctaaggcggatgaggtgaaaaccatcactcttcccgatgtactcaccatcaaggagctggcagagaagatgaagcttcagccatctgtcattgtaaagaagctgtttttaaagggccaggtagtgaccctgaaccaggaaatcgattatgagcaggcagaagagattgccatggaattcgatgtcctgtgtgaaaaggaagtaaaggttgatgtcatagcggagcttttgaaggaagatgaagagagcaccgaggacatggttcccaggtcaccggttgtgtgcgttatgggccacgttgaccacggtaaaacttcccttttggacgctatccgggagacaaacgtgactgcaagagaggcaggcggcatcacccagcatatcggtgcctctgtcatcgagataaacgaccgaaagattacgttcctggatacgccgggccatgaggcgttcacggccatgcgtatgaggggagcacagtccactgacattgccatcctggtagtggccgcggatgacggcgtaatgcctcagaccgttgaggctatcaaccacgcaaaggcggccaatgtggaaatcattgtggccatcaacaagattgataagccaagcgccaacgtggataaagtaaagcaggagctggctgaatacgagctgattcccgaggattggggcggcagcaccatcttcgtacctgtctcagcccatacaaaagagggtatcaaggacctgctggaaatggttcttctgaccgcggacgtgcttgaactgaaggctaaccccaaccgtaagggcaggggccttgtaatcgaggcagagctggataagggcaagggacctgttgccacggttctggtacagaaaggcaccttaagagtaggcgagaccattgcggccggcgcgtgcttcggcaagattcgtgccatgatggacgacaggggccgccgcgtgaaggaggcagggccgtccacaccggtggaaatcctgggccttaacgatgtgcccaatgccggtgaggtatttgtggcaactgaaaacgagaaggaagcaagaaactttgctgagacatttatctcagaaggaaagagtaaactgatagaggataccaaggcaaaactgtctctggatgatctgttcagccagattcaggccggcaatgtaaaggaactgccgattatcgtaaaggccgacgtacagggctccgtggaggctgtaaagcagagccttaccaagctctccaacgaggaggtcatggtaaaggtgatccacggcggcgtaggcgccatcaacgagtccgacgtttccctggcatccgcatccaacgcaatcatcattggcttcaacatccgtccggacgcgaccgccaagtccattgcggagcgtgagaaggtggatatccgtctgtacaaggttatctatcaggccatcgaggatgtggaggcagccatgaagggcatgctggatcctgtattcgaggaaaagattatcggccacgcagtgatccgccagacctttaaggcgtccggcatcggaaccattgcaggctcctatgtattggacggcaaattccagagaaactgcagctgccgtgtcaagagagacggagagcagatttttgaaggaccgctggcttccctcaagcgtttcaaggacgatgtaaaggaagtggcggcaggatacgagtgcggccttgtatttgagaagtttaatgatcttcaggaagatgatgagatcgaggcttacatcatggtggaagtaccgagataggcatcatggctaagagaggagttacatgcgtaagaacagcataaagaataccagaatcaacatggaggttcagcgggaactcagtgaaatcatccgcgggggaatcaaggatccgaggattcatcccatgaccagcgtggtttccgttgaggtcacaccagaccttaagttctgcaaggcgtatatcagcgttcttggggacgaggaggcggggaaatctaccatccagggactaaagagcgcagaagggtatgtgcgcagggagcttgcaagaagagtgaacctgcgcaacacgccggagcttaagttcatattggaccagtccattgaatatggtgttaacatgtccagactcatcgatgaagtgacaaaagaccttcatcaggaagaaacacaggatgaagaaggagcaaaggaggagttttaatgacgattcttgaacagatgttagagggcaccaagtccgtcgccatcctgggccatgtacgcccggacggcgactgcctgggctccgcactgggactttataactatctccggctgaatcatccggatatacgggcagccgtgtatctggaggagtcatctcctaaatttaattatctgaagggatatgacaaaatccgccaccaggttgacgatgcgtactatgagctctgtgtctgcctggacagcggcgatatccagcgtctgggtgattttaaacattacctggaccaggcggacaaaagcctgtgcctggaccatcatgtgaccaatacccgttacggcggcaccaacgtggttccggatgaggccagttctacctgcgaggtcctttttgaccagctggatgaagaaaaaatcgaccgtcacacggcggagtgcctgtacaccggcatcatacatgatacaggcgtgtttaaattttcctgtacatcagcccacaccatggagatagcgggaaagctgatggaaaagggaattgacttcggagccatcatagacaacagcttttacagaaaaacatacatccagaaccagattctgggcagggccctcctggagagcataaccttttttgacgggcggtgcatcttcagcgccatccgccagagcgagatggagttttacggggttgacggcaaggacatggacgggattatcgaccagctgcgcctcacggaaggtgtggaggtggctatcttcatctatgagacaggcgcccaggaattcaaggtcagcatgcgttcccggtatctggtggacgtaagcaggattgcggcgttctttggaggcggaggccatgtaagggctgccggatgtaccatgagcggcagcatacacgacgttatcaacaatctgtccgtacacattgccgggcagttagatgctgtcccggacggccagaagtaaggaacataccatgtatcacggaatcataaatgtatacaaagagccgggctatacttcccacgatgtggtagcccggcttcgagggattttaaaacagaaaaaaataggccatacaggaaccctggacccagcggctgaaggagtccttcctgtttgtctggggacgggcaccaggctgtgcgacatgctgacggaccggtccaagacataccaggccgttatgctgctgggctgtgagacagacacccaggacaccacaggaaccattctggcagaaaacagggaaggggcactgtcccttaccggggaacaggtaagggacgctgtcatgggatttaggggtaattacgcccagatacctcccatgtactccgcccttaaggtggacggaaagaagctgtacgagctggcaagggcgggaaaggaagtggaacgccagccaaggccggtgcagattctggacataaaggtaaacgggatagatctgcccagggtttggatggaggtcacctgttccaagggaacatacatacgtaccctgtgccatgatatcggaaggcttttgggatgcggcggctgtatggatcaccttacacgtaccagggtggaccgcttcagcattgaggacagcctgacactggaccagctggaacagctccgtgaccagggagaactggagagctgcatcctcccggtggaggaggccctgcagtccctccggcctcttagatgcctgccggaagcagactccctcttacacaatggcaatccctgctttgcaaggcagctagactggagccggtcagatgagcgggaggccggggctgaggacggacagatgttccgcatgtatgacagcaatcacagatttacgggggtctaccagtaccagaaggacaggcactggtggaagccctggaagatgttccccatgtagcatcccatgcagcgccgccggaacatctggaacagaggaaaaacgaggaagtgacaggatgaggtatatagcagacaccacagaatttcagatagaggagcccaccatcgtgactttgggcaagtttgacggcaggcacagaggccatcagaagctgttaaggaccatgatggagctgaaggcagggacagggtatcccactgccatcttcacctttggcacggctccgggaacagcagtcacgggtcagccccagaccgttatcaccaccaatttggagcgccgcgccaacatggagaaggtgggaatcgattatctggtggaatacccatttaccgatgaaacccgccatatggagccggaaacctttgtcagggatattctggcaggccgtatgcatgccagggaaatcgtggtaggcccggactgcagctttggctacaagggggcaggcagcgcagcactgcttctggccatggcccatgacctgggataccgtctccatgtcatagaaaaggaaaaggaccacaggcgcgacatcagcagcacctatatccgagaagaactggaaaaaggcaatgtggaaaaagccaaccagctgctgggccagccctacgccatccacggggaagtggtgcacggcaaccacatcggaggcagtctgttaggttttcccacagccaatatacttccgcctcccatcaagcgcctgcccagatacggcgtttatgtatcccgcgtgctggtggacggcgtctactataaaggcgttaccaacattggaaagaaacccacggtgggaggagaatacccggcaggggtggagacctacatcttcggcctggaaggcgacatctacggcaaaaacatagaagtccagatcctggccttcgaccgcccggaacaaaagttcacatcccttgaggaactgaaggagcggattgaaaaggataaagagtttgcgaatgcatattatgaaaaacatccggagattcttgtggagaaataagatgtggtacgatgccatgccaaattgccacgccaaatttattttttctcactttacaaccccacccatttatgctatactaagtcggtataaaataacgccgatgcccggttacctggtgactccagccggcagcctggtttttggtgagatgaataatattaaggaggaaacaccatgatttcaaaggaaaagaaagcacagattatcgcagagtatggccgtaagccaggggacacaggttcacctgaggttcagattgccattctgacagagagaatcacagaactgaccgaacatctgaagcagaatccaaaggatcatcactccagaagaggtcttctgatgatggttggacagagaagaggtcttcttgattacttaaagaagacagacctggaaggatatcgtgcattaatcgagaagcttggtatcagaaagtaattctgaagattagggtggagggaactccaccctatatttgcttatcatggaaaggaagaagcggtgtgggcggcagaggtatcactccgagaccgctgatgtacctgcaggattatgatttctgcaggcagatcagtagtttcggcgtcttctgcccggggatgacatatggattggacatgccccggccataccggtaacatttattatttttattgtaaaggagataccagtatgtttaaaagttttagtatggatttggcaggacgcaaactgaccgttgaggttggccgtgtggctgcccaggcaagcggtgcggccttcatgcactatggcgatacggtggtgctttccacggcaaccgcgtcgtccaagccaagggagggcattgatttcttccctctcagcgtggaatatgaggaaaaattatactcagtaggaaagattccgggcggtttcaataagagagagggcaaggcttctgaaaatgctgtcctgacctgccgcgttatcgaccgtcccatgcgtccgctgttccccaaggattaccgcaacgacgtgaccctggacaacatcgtaatgtgcgtggatcctgactgcagccctgagctgacagccatgctgggttctgctattgccaccagcatttccgatatcccgtttgctggtccctgtgctaccacgcaggtaggtctgattgacggccagttcatcatcaaccccactgctgaccagaagcaggtgtctgatatggctctgaccgtggcttccaccagggaaaaggttatcatgattgaggccggcgccaacgaggttccggagcagattatgattgacgccatctttaaggctcatgaagtgaaccaggaaattatcaggttcatcgacaccatcgtggctgagtgcggcaaggaaaagcactcttatgagagctgcgcggtgccggaagagctgtttgcagccatcagggaaatcgtgaccccacaggaaatggaagaggccgtgtttaccgatgacaagcagacccgcgagaagaatatagcggaaatcacagcaaagctggaagaggcatttgccggaaacgaagaatggcttgccgttctgggcgaggctgtttaccagtatcagaagaagacggtccgcaagatgattttaaaagatcacaagcgtcctgacggccgcgctatcacggaaatccgtcacctggccgcggaagttgaccttcttcccagagttcacggctcaggcatgtttacccgcggccagacacagattctcaacgtctgcaccctggctcctctgtccgaggcccagaaattagacggcctggatgaaaatgagaccagcaagcgttatatgcaccactataacttcccgtccttctctgtaggcgagacaaagccaagcagaggaccgggccgccgcgagataggccatggggccctggcggagagggcgttgattccggtccttccaagtgcggaggaattcccatatgcaatccgtaccgtatctgagaccatggagtccaatggttccacctctcaggcaagtatctgtgcgtccaccctttcgctgatggctgccggtgtgcctattaaggagatggtagccggtatttcctgcggtcttgtgaccggtgatacggatgacgattatctggtgcttaccgacattcagggcctggaagatttttttggcgatatggactttaaggtgggcggaaccaagaatggtattactgccattcagatggatattaagattcacggactgacacggccgattattgaggaagccattgccaggacaagggaagccagaatgtatattctggacaatgtaatgagacctgttatctcagagccgagaaagcacttaagcccatatgctccgaagattaagcagattaccattgatccgcagaagattggcgacgtggtaggtaagcagggcaaggtcatcaacaagattattgaggagaccggcgttaagatagacattacggacgacggttctgtgaatgtatgcggcacggacgaggccatgattgacagggctatccagattattaccggaatcgtcacggatattgaggcgggcatggtgtttaacggcaaggtagtgcgtatcatgaactttggcgcatttgtggagctggcccccaataaggatggtatgattcatatttccaagctgtctgataagcgcgttggcaaggtggaggatgttgtgaacatcggagatgaggttactgtaaaggtaactgaggtcgataagatgggcagaatcaacctgaccatgagaccgagcgacttggcagagaataagaccgctgccaggacagaggaaaaataaattgcctgacagaaggcagaatgaaagaggagataagtttatgaggaacatgaaaaggagctttgcggtattggctgcaaccgttatggcagtgtgcggcattgccctgacaggatgccagcagaagcttgagccggcagaccaggtagtgggagcgctgtacgagctgtctgttaaggaaaatgcggctcctatgaaggatttactgggatttgcttctgaggaagacgtaaagaccaccctgatggaagattccgccgagacagatctggtttccatgttcaagtcagagtttgaggccgcgggcatcgagttctctgacgaagaagtagctgaaatgtccgatgcccttcagggactgattgacaagctggattacagcgccgagatcacagaccagagcaaggacgagaccaccgtacttctgaaggttaagagctattccatggatgatatgcagaatatcatggtagacgttatgaccgacatgcagaacaacatcgacgaagaaacagccgcagccatcatggccggtgatgaagatgcccttcagaagctgatgcaggatgctgtaaagcagtatatgggaaagattggcgagatggtgccggcagaagagatgaccgagctgaccatcaagtgccagagagtcaaggtggatgtaagcggcaaggaaaaggtcgcatggatgcctcaggatttaagcaagttctctgacgaggtgaacaacgccacattcaaataggtataaagaaagggacagtgcctgtgaaaacaggcattgtcttttttaggccttcgttatataatggtttttgagttatcagattgagaagaatataggagactttaacatgagcagagtaaggacaaggtatgcacccagccccacgggcaggatgcatgtgggaaatttaaggacggcattgtatgcctatctcatagcaaagcatgagggaggggatttccttctccgtattgaagatacagaccaggaacgtttcgtggaaggggcagtggaaatcatataccagaccctgaaggatacaggcctgatccatgacgagggtcctgacaaggacggaggatgcggcccgtatgtccagagcgagcgccaggcatccggtatttacctggagtacgcaaagaagctggtggaaaaaggagaggcttactactgcttctgtactccggagcgtctggccgcccttaagaccactgtaaatggagaggaaatcatggcatatgataagcactgcctccatttaaccaaagaagaggtggaagccaacctggcagcaggcatgccctatgtcatccgccagaacaatcctaccacgggaaccaccacattccgggacgagatttacggggatatcacagtggacaactccgagctggatgacatggtccttatcaagtcagacggatatcccacctataatttcgccaacgtggtggacgaccatctgatgggtattacccatgtggtaaggggaaatgaatatctgtcctcgtcacccaagtacaacaggctctatgccgcctttgggtgggatgtgccggtctatgtgcactgcccgctgattacggatgagagccaccataaactgagcaagagaagcggacactcctcctttgaggaccttttggagcagggcttcatctctcaggccgtggtgaactacgtggccctattgggctggtcaccggagaacaaccgggagatattcactctggaggagatggtaaaggaatttgattaccaccgcatgagcaaatcccctgccgtgttcgatatgacaaagcttaagtggatgaacggcgaatacatgaaggctatggattttgataccttctatgagatggctgagccgtatctgaaggcggctgtcagcagggatttggatcttaagaagatagcgtccatggtcaaaacaaggattgaagtgttccctgacattgcggaccatgtggatttcttcgagacccttccggaatacgatacggccatgtatacccacaagaagatgaagacaaacccggagacctctcttaaggttttaaaggatgtgctgcctcttctggaagcacaggaggatttcaccaacgatgccctttacggtgtcctctcaaaatatgtggaggacacgggggtcaaaaccggctttgtgatgtggcccatccgtaccgccgtgtccggcaagcagatgacgccggccggagccacagaaatcatggaagtcctgggcaaggaggagtccctggccagaatccgcaaagggatacagatgcttgaggcataggaatctagtaaatggcatttaacgacgcacaaaaaatggcaatccggcatagggaaggtcccatgctggttttggcaggacccggttccggcaagacgacagtcatcaccaaccgggtccgttatcttacggaaaaggcaggcgtggatccctcccatattctggtaattacatttaccagggcagcggccagggagatgaaggagcgctatgaacagattacacaggcaggatgcagccgggtttcctttggaaccttccattctgtcttttttctgattctcaaactggcttaccggtataaggccgcggacattgtaagggaagaacagcgcgttcagttcataaaggaaatgctgtcaaaatgcgatttggaggttgaggatgaaggcgagttcatatcctctgtgctcagtgaaatcagcatggtgaagggcgacatcatggacatggaccactactatgcaaaaaactgctccgaggacatgttcaggcagctgtaccggggctatgaagcacggctgagacagaaccggctgctggattttgacgacatgctggtgatgtgctacgagctgtttaaggaaagaaaagatatcctgtccgcatggcaggacaagtacaggtacatattaatagatgagttccaggacattaaccggattcagtatgaaatcgtaaaaatgctggcccttcccagaaacaacctgtttattgtgggggatgacgaccagtccatttaccggttccgcggggcaaagccggagctgatgctgggctttgaacgggattatcccggtgcgggaaaaattctcctggataccaattaccgctgcagccgccagattgtggaggctgcggggcgggttatctcgcacaacaggacccgttttcccaaggaaatcagggcggcaagggggaagggccatccggtcatcataaaggagtggcaggagcccatagacgagacgttaggaatcgttacagagatacgcggctatgcctccatgggcatatcctacaatgatatggcagtgctctaccggaccaacatgggcccccgtctgctgatttccaagcttatggaatacaacatacccttttatatgagggatgcggtgcctaatctgtatgaacactggatatccggaaatgtgatttcctatatccgtgccgccttaggggatttgagccgttccaatgtgcttcaaatcatcaaccgtcccaagcgctatatcagccgggatgccctggaggaccggcaggttaactgggagtcggtgaaatccttttaccaggacaagaactggatgatggaccggattgaacagctggaatatgatttggcggtgttgaggaatatggctccggccgcggccgtcaattacatccggaaggcagtggagtacgatgagtacatccgggaatacgcccagtccagaaggatgaagccggaggagctgtttgagacgctggaccagcttcaggaaagcgcggccggctttaagacatatgaacactggttcacccatatggaggaatataaggaacagcttaaaaaacaggcggcaggcagggacgaacagcgccagggagtcagcctcatgaccatgcacagcgccaaggggctggaattcagggtggtctatatcctggacgccaatgaaggcgttacgccccatcacaaggcggttctggacccggatgtggaggaagaacgcaggatgttctatgtggctatgacaagggccagggagaggctccatatttatcatgtgaaggagcggtaccgcaagaaacaggcgaaatcaaggtttgcagaggaggcagaaggatgaatgaaacagggcttgtccagatatactgcggtgatggaaagggaaagaccacagcagccataggcgcggctgtacgggccgccgggcggggataccgggtgctggtggccaggcttctaaagacagatgattcaggggaggtaacagggctctcccatgttcccaacattacagtgctgccctgcggccggaatttcggattttcctggaacatgacccaggtccggcggaaggccgctgccctgtattatgaccactgtcttatgaatgcctggaacatggccctgggagcggacgggggagaaccctatgacatgctggtgctggatgaagccatcggcgcctgtaaccttgggtttgtggatgaggccggcctggtaaaggcccttaaggaaaaaccggctgccctggaggtcattcttacaggacgctgtccctcagaggccctgcgggatcaggcggactatattacggaaatggttatgagacgccatccctatgaacgcggagtcggggcaagggaaggaatcgaatactagaaaatgaatatgagagaatatgttcttgcattttaagggtgagtctgatagagtgtaagagaaaagaaacaagcttaaatttttggaagcaagagaggaatcaggatatggcagacgagaaagatctgaatgaagaagagcaggagatgacagttacccttactctggatgatgatacagaagtggagtgcgtggtgctgactatctttaacgcgggagagcacgagtacattgcccttttacccatggaaggcgctgattcggaggaaggcgaggtatatctgtaccgttacagcgaaaccgaggacggaactcctaacctggacaacatcgaggatgacgatgagtacgaaatcgtggctgaagcatttgacgagctgctggatgcccaggaatacgatgagctggtgggcgaggacgaggaagaataatcaggataattatgatacagaggaacggctccgggagaaatcccggggcttttttcagttcataggaaagcgcgcccggtggctcctgttctatcggatgcccagttgtgaaacttgtgtgaaatgatggaaatgttccttgatttttgttaaaataattcctataaaagaatgaaaaaaagccagattatatgtaaggaggcagtatcatggatacacttaagatattagtagtggacgacgaggccagaatgaggaagctggtaaaggatttcctcaccaataaagggtttgcggtcatagaggcgggagacggcgaggaggcggtggacgtattctttgcgcaaaaggacattgccctggtgcttttggatgttatgatgccgaagatggacggctgggaagtgctgaggaccatccgcaagtattcccaggtaccggtcattatgctgacagccagaagtgaggagagagacgagctccagggtttttccctgggagtggacgagtatatatccaagccctttagtccgaagattctggtggcacgggtggaggccatcctcaggaggacgaatgtggcttccgcggacagcgtgaatgtgggaggtatttgcattgataaggcggcccaccaggttaccatagacgggcaggagattgatctgagctttaaggagtttgagctcctcacctactttgtggagaatcagggaatcgccctttccagggaaaagattctgaataatgtgtggaattatgactattttggagatgcccgcaccatagacacccatgtgaagaagctgcgcagcaagatgggagaaaagggagaatacattaagaccatatggggcatgggctataaattcgaggtgagcgaaggatgaagcattccatcagggtaaaattcaccatgatattcattggtctgatggcggcggtgttagtcagcatgtgggcggtgaacagtttttttctggagggcttttatgcaaaacaaaagctgcagcttttggaaaacgcctatgaaaatctgaatgccattgctgtggacaaggagtttcagggccagaatatcacggaagaactgcagagcctgttctcaagcgatggagagcagacagaggccagccgtctattgcggcttatgaatgataaatacaatacaaccatcgtgattcaggacagtattaccggagagctgattccgctggcaaaggacggcaaattcctggcggatgccctccaccgctatatattaggaatcattgaccccaggacggagaccctgatatcccaggatgaccatcaggtgcagaagatatatgacagacggtcacagggctattatctccagagctggggcttctttgacgataacaggaccatgtttatcatgtccatgcccctggccagcattcacgacagcgtgaatatttccaatgagttcctggcttacgtgggacttgcggcccttgtgctgggaagcgcccttatgtactatgccacaaaaaaggtggtttctcctatccgttcccttgcggccctgtctgccagaatgtcggagctggactttgaggcccgctacaccggtgattcggaggatgagattggagtgctgggccgcagcatgaatacactgtcggaaaagcttaaggagaccatcggtgagctgaagacagccaacaacgaactgcaaaaggacattgaggaaaagataaaagttgatgaaacccgcaaggaatttatcgctaacgtgtcccatgagctcaagactcccattgccctgatacaggggtatgcggagggcctgaccgagggcatggccgaggacgaggacagccgtaattactactgcgaggtcatcatggacgaagcaggcaagatgaataagatggtgaagcagcttctgaccctgacagccctggaattcggcaacgacatgcctgtgatggaacggttcgatatcgcggccctgattcacggaatcctgtcatctgccggcatcctgctccagcaaaaggaggccagggtggtttttgaccaggaggagccggtttgggtgtgggcggatgaatttaagatagaggaggtcatcaccaactacctgaacaatgccatgaaccacctggagggggaacggcggattgaaattcgcttggaaaggaaagaaaaggaagtccgcattactgtgttcaatacggggcgccatataccggaggaagacctggggaacctttggactaaattctataaagtagataaagccaggacaagagaatatggaggcagcggcatcgggctttccatcgtcaaggcgattatggattcccacaacaaatcatgtggtgtagaaaatgtaaacgggggggtggagttctggtttacagtggacagcgggatataaaacggttataaatacagtattttacagttatttttgataatttgaaaatgtgcataaaattgaacctactccaaaatggattttataactattgacaaaatatgagcatatgctacaattaaaaagtaactgttgtccccttgttaaaaaaatatttggaggtaagtatgagaaaaaagtttataggcgttatgcttgcggcagccatggcggcaggacttgccggctgtggcagctcaggaggcacaagcacgggcgcagcggcagctgatacccaggctaccgaggctcagaaggaagaagcaaaggacgatgccaagaaagaggatgaaaaagaggattcagaggcatctgacagtgagggagccagtgatttccacattggtatcataacaggctccgtatcccagtccgaggatgacaggcgtggcgccgaggcgttccaggccatgtatggcgaggatatggttaagctggctatttatcctgacaactttaccgaggagttagagaccaccatccagaccattgtcaacctttctgatgatcctaagatgaaggcaatcatcatgaaccagtctgttcccggcacaaccgaggctttccgtaagatcaaagagacccgccctgacattctctgtattgccggcgagggccatgaggatcttcctgagattggcagcgcggctgacctggtctgcaacaacgacttcgttgcccgtggttacctgatcatccgcaccgctcatgaacttggctgtgatacgtttgtacatatttccttcccgcgtcacatggcttatgagactatgagccgccgtgtggctgtcatgaaggaagcctgcaaggaattcggcatggaattcgtacttgagacagctccggatccaacctctgacgtaggtgttgccggcgctcaggcgtacatacttgagaaggttccggagtgggttgagaagtacggcaagaacgctgcttacttctgtacaaatgacgcccataccgagccgctgttaaagcagctcatggaatacggcggctacttcatcgaagcagaccttccttccccgctgatgggctatccaggcgctcttggtatcgatctgactgccgaggctggtgattttgataagattcttgccaaggttgagtccacaatcgttgaaagaggcggcgctgaccacttcggaacatgggcatattcctatggatataccacatccgccggtcttgcccagcatgcactgaacgtcctcaatggcgagagtgagcttgacgatattgatgatattgcaaaggcatatcaggtattctctcccaaggctgagtggaatggttccaattacaccaatgtggaaaccggcgttaagttagataatgtgttcctggtatatcaggatacctatatcatgggcgatccgggacatttcatgggctccactaagattgaggttccagagaaatacttcaccatcaagtaagacacttactaataaaaataagtacggagaacagtggggaggggttgctctcccccctgttgtgttaggtgggcataatatgatgaataacaacactcccttattggagatgcgtaatatcaagaaggatttttttggcaatcaggtcttgactgatattaactttacactgaatgccggcgaggtactgggtcttgtcggcgaaaatggtgccggtaaaagtacattgatgaaactcctctttggcatggatgtgattagggaaaccggcggatatggcggagacgttctgattaatggcgagaaggtcagcttctcgactccctttgatgcattggaggccggaatcggcatggtgcatcaggaattttcattaataccgggattcacggcaacagataatatactgcttaaccgtgaaccaaagaaaaagaatattatctcggaaattttcggcgacagattagacacccttgactataaggagatggccgaacgttctgagcaggctattgataagatgggcgttaagattgacgccaaaatggttatcagcgatatgcccgtgggtcataagcagtttactgagatcgcgagagagctcagcaaggataacctgaagctgttgatactggatgagccaacggctgttctgacggaaaaagaggcagaggcgctgctggattcaattcgcggcatggctgccaaaggcattgccgtgattttcattacccaccggctgcacgagattctgacagtctgtgacaaggtagtcatcatgcgggacggttacgttgtaaaggacgtgcctgcaaaggagacggatgttgcggatatcacaaagtggatggtgggcagaaatatccagtccacggccagagcggatatcaggattaatccggatgcaaagaacatcatgtccatccgtaatctatgggtggatatgtcaggtgagactgtgcgcaatgtggatcttgatatcaaggaaggcgagattcttggcataggcggactggccggacagggcaagctgggcattccgaacggaatcatggggctttgcgaagcgggcggtaaagtggaatttgacggcaggcccattcctcttaacaacccaagaagatgcctggatgcatccctggcctttgtttccgaggacagaaggggtgtgggactccttcttgacgaaacccttgagtggaatattgcattttctgccatgcagattcaagacaaattcctcaagaaatattttggagggatgattacctggagagatgaaaaagcaatccacgaagtgaccaaaaaatacatagacgagctaatgataaaatgcaccagctccaagcaaaaggcaaaggagctttccggtggaaaccagcagaaagtgtgtctggcaaaggcctttgcacttgaacctaaattcctgtttgtatccgagcccacgagaggcattgatgtgggcgcgaaatcattggtactggatgcccttaagaagtttaacaaggagcatggagttaccgttgtcatgatttcctctgagctggaggaactgaggaccacgtgtgaccgtatagccattgtttcgggcggtaagattgctggaatcctgccggcgaccgaatcctcagaagaattcggtatgctcatggtcagccaggttaaataaggggggagacagcatggaaaaaatagaagatagtacaataaatattgggaagaagacgaaaatcaaggaattggttgacaacttcggtctgccgaggctgatcattgccggattccttctggcgctcttcattctggcgccaatcgtcggagcggatcttcccacacagataaccaatacaattaaccgtttcagctggaatgcggtcctggtactggcaatggtgccgatggtgcattcaggctgcgggctgaattttggccttcctttaggcattatctccggtcttctgggtgcgaccatgtccattcagtttggatttaccgggcctctcagctttttcatggccattcttatagctactccgtttgcgctgctgtttggcggcggttacggctggctgctcaacaagattaaaggcggcgagatgatgatcgccacttatgtaggtttctcatccgtatcctttatgtgtatgatgtggcttttgctgccgtacagcagtccgaccatggtttggggattgtctggcaaaggccttcgtacaacaatctcactggagggtttttacgacaaggccctggccaatttcctgcagattaatatcggcaggatttccatacctacgggcagcctcctgttctttgcctttctcgccttccttatgtgggcgttccttcacacgaaaaccggtactgccatgacggctgtgggctccaatcccaactttgccagagcgtccggcatcaatatcgataagacaagaatgctttccgtcatcatgtctacctggcttgccgcggtgggcatcctgatgtatgaacagggcttcggctttatccagctttacatggcgccgttctatatggcgcttccggcagtgtctgcaatcctgattggaggtgcttcagtcaataaggcatccattaccaatgtaatcataggtacgttcctgttccagggcattgttaccatgaccccaacggtaatgaattctatgattcatatggatatgagcgaggttatccgtatcgttgtttccaacggtatgattctttatgctttgaccaggaagacggagggatcaaaatgagtaaaaaacagaaaaataacggcagtaatagcattctcgaattagttcggaataacactgtgccgctgatgtttatcattatctgcgtcgtctgcattccgatatccggtttttcaccggggtatctgctcaatgagattgtcacgagattgggcaggaatgctttcctgattctgagcctgttgattcctattatggcgggaatggggctaaactttggtatgacgctgggcgccatggcgggggaaatcggccttatctttgtggccgactggcagatatggggcatacccggtatcatccttgccatgatcatctccataccgatttccgttctgctgggccttttctgcggtaagatgcttaacatggccaaaggcagggagatggttaccagctatatcatcagcttcttcatgaacggtctgtatcagctggtggttctgtatatgatgggttccattattcccattattcattcctccattaagctgccaagaggttatggtgtccgcaacacggtcagccttcttcacatgaggcagtatctggacaattttctggccatccatatcggaggtgtcaagattccggtgctgacccttatcatcattgccctgctgtgcctgttcatcatatggttccgcaagacaaagctgggccaggacatgcgtgccgttggccaggacatggatgtggccggtgacgccggaatcaaggtagagaggacccgtattatcgctatcatcatgtcaacggttttcgccggacttggcatggttatctatctgcagaatatgggcaatatttccacttacagctcccatacgcagattggcatgttttgtatcgcggctctgctagtgggcggggcctctgttgacagggcgtccattggcaacgtattccttggagtcatcctgtttcatctgatgttcatcgtggctcccaaagcaggcgcgacgattaccggtgattccatgattggtgagtacttccgtgtattcatctcctatggcgtcatcaccgttgctcttatcatgtatgagacgaaaaaacgaagatccaagagcaaggctggtcagatgcttcagcttgcgcaaagtgaggagggggagaattgagagcgaaacgtaccattctattcagaataggagcaatcctactcctgctcgttatcgcaggtattatgatggttattggccgcggacatacggtgtatatagataataagtccattgattataatggtcagacctataccactccttataaggtagttgtgtatgtggacggtgagcaggtagcgaaactacgcgataaagagagaggcatggccacctgtattggccagacctttaaaatgactctggaaatcactcaggaaaagggcggaagcgaagaaatggtcgatgtgacagtgtcccttccgcatcacatggacggtattgccattaatctgcctgcgtatttggccggacttcctgaggaagcatatctgtctgagttccaggttgcgccggaggtggttgaagaggagagtgaatcttcatccgatgaaattccggttgacggaattccggctgacgggatgccttcagacatatagttgaagccgccctggtatataagtgccgaaccactgcttgtgaaaccatgcagtttattggggctgtgaaaaaagccccttaacaaaaaagaacattttcaggttttaccctggaaacgttctttttttgttgatataatttatctgtcatgaaaaacaataccatgtcttattatagtccaaagcagggaagatttccagtatttcttgcagatagtctggatatctgcgatccggtattggtatttgaccggatcatggaggagatcggaatagaacagtatctcaggccggaaccattataccgctatggcaggccgggatataatcgggtcaacatgcttaaaacaatcttattcggctttatggacacgggatacgcaagtttaagggaattggaggaccggtgcagaaccaatatccgttacatgtacctgatggattacgaaacacccggttaccgctccttcggacactttataaatgatgaaatcaacggaaaggctgaagatattttccgtgccgttatggagtatatccgaaaaaaagacgccgtggatctggaacatctctatatagacggctcaaaatttgaggcaaatgcgaataaatacagctgggtatggaaaaaagcaacggaaaaatccagataccggctgtttgcaaagatcacacagctgttgggtcagatcaatgaggatctggcctataccgggctgaaggttgagacgaacacggaatatactccgcaaggtctggagatgattcttggacgatacgcttttcagtgccggatcgacgaaaaagcgtttgtccacggcaggggacaccgaaagaccagggagcagagatattacgagaagctgaaagaatacacacaaaagctgaaagaatatgtgaaaaagatccggctctgcggtccggaacgcaacagctattccaaaacggaccatgatgccacgtttatgaggatgaaaaaggactacatgggaaacgaccagctgctcccggcatataacattcagatcggggcagcggatgaatatatagcggtcatcgacgtgaagcagtaccgctcggatatggactgctttgtgccgttgatggagaaatttagggaactgtatgggttttacccgaaatatccggtagcagatgcgggatacggctcgtacaacaattatatttattgtcaggaacacgggatggaaaagtacatgaaatttccgatgtacaaaaaagagacaaaagataaagaatatcatgagaacccgtttcgtgcggtgaactttaagccgggcccggatgggaccctgatgtgcccatggggaatgtccttataaggaacaatgtaaaaagacagataagaaccgtatggtgtgtatgaaccgggagctgagctgtatgcaccaggaagtagtggaaaacctggaaagtatccagggagcgctgctgcggatgaaccgttcgatacaagcggaagggacgtttggaatcatagagtatgaccgatggtacaaacgtgtggtaagaagaaagctaaaccgagtgagtctggaaatatatttggtatcaataggccataatctctataaattcaggaataaaaagaaaagggctgctgttgcggcataaaaaagaagggcccgctttctgtgggggtaagggggaggtatatgcttttttaggaaagtaacagacctccggatcaaaaagtgagggggctgtgggaaatagagtccgtctactctattttttcacagccccatataatatggattaaaaagttgtaaaaacctgttgacatttgtcgaagcatctggtaagatatctcttgcgctgcggtgagtaccaaaagcgcaagagagtaagaaagaaaaaaatgaaaaaagttgttgacaaacacaagcgactgtgataggatataaaagttgctgctgaacaagacgacaacaaagaaccttgataattgaagattagacagtatgtaaaaccctgaaaattctaaaaacaaaaggtctggtttagaccttaggatttgagaaaattcagaacaaaaccaagtaatgaaggttaaagataactagccaagctaagtagtctgaaaacctggaatcaacttttgaacatgagagtttgatcctggctcaggatgaacgctggcggcgtgcctaacacatgcaagtcgaacgaagcaattaagatgaagttttcggatggaatcttgattgactgagtggcggacgggtgagtaacgcgtggataacctgcctcacactgggggataacagttagaaatgactgctaataccgcataagcgcacagtgccgcatggcagtgtgtgaaaaactccggtggtgtgagatggatccgcgtctgattagccagttggcggggtaacggcccaccaaagcgacgatcagtagccgacctgagagggtgaccggccacattgggactgagacacggcccaaactcctacgggaggcagcagtggggaatattgcacaatgggcgaaagcctgatgcagcgacgccgcgtgagtgaagaagtatttcggtatgtaaagctctatcagcagggaagaaaatgacggtacctgactaagaagccccggctaactacgtgccagcagccgcggtaatacgtagggggcaagcgttatccggatttactgggtgtaaagggagcgtagacggcgaagcaagtctgaagtgaaaacccagggctcaaccctgggactgctttggaaactgttttgctagagtgtcggagaggtaagtggaattcctagtgtagcggtgaaatgcgtagatattaggaggaacaccagtggcgaaggcggcttactggacgataactgacgttgaggctcgaaagcgtggggagcaaacaggattagataccctggtagtccacgccgtaaacgatgaatgctaggtgttggggggcaaagcccttcggtgccgccgcaaacgcagtaagcattccacctggggagtacgttcgcaagaatgaaactcaaaggaattgacggggacccgcacaagcggtggagcatgtggtttaattcgaagcaacgcgaagaaccttaccaagtcttgacatccccctgacgggccggtaacgcggcctttccttcgggacaggggagacaggtggtgcatggttgtcgtcagctcgtgtcgtgagatgttgggttaagtcccgcaacgagcgcaacccttatccttagtagccagcacgtgaaggtgggcactctagggagactgccagggataacctggaggaaggtggggatgacgtcaaatcatcatgccccttatgatttgggctacacacgtgctacaatggcgtaaacaaagggaagcgagacagtgatgtggagcaaatcccaaaaataacgtcccagttcggactgtagtctgcaacccgactacacgaagctggaatcgctagtaatcgcgaatcagaatgtcgcggtgaatacgttcccgggtcttgtacacaccgcccgtcacaccatgggagtcagcaacgcccgaagtcagtgacccaaccgaaaggagggagctgccgaaggcggggcaggtaactggggtgaagtcgtaacaaggtagccgtatcggaaggtgcggctggatcacctcctttctaaggaagaagaagtaagggttttagatactgtctagtgttcaatgaaaaggacacaaagaaattctggtgccgatgcgcttaggggaaacacccgtacccatcccgaacacgatggttaagacttaagcggccgatggtactatgctggagacggcatgggagagcaggtgggtgccagatttccatgggggtgtagctcagttgggagagcacctgccttgcaagcagggggtcaagagttcgaatctctccatctccatttgctgaagtgactgtgaggaagaaggctaaaccggaaacctcggaagtgacggaagcataccatacgtaccttgaaaaccgcatattgaataaaaatgaattgaatattcaaaatcagaatatcaagacatccgaggccatacaagagattgtatggaagaaacaaacttgtaaatgcgaaagcgtttataaacaaacctagaaccaaagcgtccaacgctatggacgtgagaggaaccgcggcaacccgccgcggggaatcattttggttaagctataaagagcgcagggtggatgccttggcactaagagccgatgaaagacgtgataagctgcgaaaagcttcggggaggagcaaatatcctttgatccggagatatctgaatggggaaacccggctgagcaaacctcagtcactgcatggtgaatccatagccgtgcagggggaacccggtgaactgaaacatctaagtagccggaggaagagaaagaaacatcgattcccaaagtagcggcgagcgaaatgggaagagcccaaaccagcgtgcgtgcatgctggggttaaggactgcgtacgtgaaccgaattgttagtggaactgtctgggaagtcaggccggagagggtgaaagccccgtacacgaaagcaataggaagcagcaggatccagagtaccacgagacacgagaaaccttgtgggaagtaggagggaccaccctccaaggctaaatactccttagtgaccgatagcgcatagtactgtgaaggaaaggtgaaaaggaccccgggaggggagtgaaaaagaacctgaaaccctgtgtttacaagctgtggaagcacgttaaggtgcgaccgcgtactttttgtagaacggtccggcgagttgccggtactggcaaggttaagagcttaaggctcggagccgaagggaaaccaagtctcaaatgggcgtcaagtcagtacaggcagacccgaaaccgggtgacctatccatgtccaggttgaagcggaagtaaaattccgtggaggaccggatccacatccgttgaaaagggtgggaatgaggtgtggataggggagaaattccaatcgaacccggagatagctggttctcctcgaaatagctttagggctagcctcatattagtttagcggaggtagagcactgaattcctaagggggcgtcaaagcttaccaagggatatcaaactccgaatgccgcgtaaatgatgtatgggagtcagactgcacgagataagttgggcagtcaaaagggaaagagcccagacctacagctaaggtcccaaagtgtgtgttaagtggaaaaggatgtgggatttcaaagacaactaggatgttggctcagaagcagccacacattcaaagagtgcgtaatagctcactagtcgagaggtcctgcgccgaaaatgtccggggctgaaacacaacaccgaagcttaggaatgtcgtaagacattggtagaggagcattctcaggacggagaagcggtaccggtaaggagccgtggagtgctgagaagagagaatgccggaatgagtagcgagatggaggtgggaatcctccaggccgaatatccaaggtttccagagtaaagctgatctgctctgggtaagtcggggcctaaggcgaggctgagaggcgtagtcgatggacaacaggttgaaattcctgtaccgtgtatcatcagaactgtggggacacagaaggacagcacatcccgggaatgggaataccggggcaagcgtggtaggagtacggctggaaaaaccgccgtgcaatccgaatacgtgacgcggagcgaacaaaagtagcgaagtgtgtgattccggctgtcaagaaaagccgctatcgtgtgatacatgcccgtaccgtaaaccgacacaggtagatgaggagagaatcctaaggccggcgggagaagcattgttaaggaactcggcaaaatgaccccgtaacttcgggagaaggggtgccgcagagatgtggccgcagagaataggctcaagcaactgtttagcaaaaacacaggtctatgcaaaaccgtaaggtgaggtatatgggctgacgcctgcccggtgctggaaggttaagaggagaggttagcgcaagcgaagctttgaatttaagccccagtaaacggcggccgtaactataacggtcctaaggtagcgaaattccttgtcgggtaagttccgacccgcacgaaaggcgtaatgatttgagcgctgtctcaacaatgcacccggtgaaattgaaataccagtgaagatgctggttacctgcgccaggacggaaagaccccatggagctttactccagtttgatactgggattcggtattgcatgtacaggataggtgggaggctgagaagcatggacgccagtctgtgtggagccaatgttgggataccacccttgcgatattgggtttctaacctgcgcccgtgagccgggcgggggacaatgtcaggcggggagtttgactggggcggtcgcctccgaaagggtatcggaggcgctcaaaggttccctcaggatggttggaaaccatccagagagtgcaaaggcataagggagcttgactgcgagaccgacgggtcgggcaggtacgaaagtaggacttagtgatccggtggtatgaaagtgggattgccatcgctcaacggataaaagctaccctggggataacaggcttatcactcccaagagttcacatcgacggagtggtttggcacctcgatgtcggctcatcgcatcctggggctgtagcaggtcccaagggttgggctgttcgcccattaaagcggtacgcgagctgggttcagaacgtcgtgagacagttcggtccctatccggcgcgggcgcaggatatctgagaggagctgtccttagtacgagaggaccgggatggacagaccgctggtgtatctgttggcctaccaaggccatggcagggtagccaagtctggacgggataaacgctgaaggcatctaagcgtgaagcccccctcaagatgagatatcccatcgcgaaagcgagtaagaccccttgaagacgacgaggtagataggttagaggtggaagtgcagtaatgtacgtagctgactaatactaatcggtcgagggcttatccaaaaaggttaagggaaaaagtggtttgtgaagcaatcggaattcaatatgcggttttgagggtacgtatcatgattataaatgtatatgtactaaatgcgcgagtggctcaggggtggagcaccaccttgccaaggtgggggccgcgggttcgaatcccgtctcgcgcttttttgttttattgtttcgttttattggctgggccttgatttatcagggttcccggcttttttgcttataatttgacatgggagagatagcagatgagaaagaggaatccaatcatgttggaggaggcccaggagcgccttagtaagattaagatgaaagaaaagacggaaacggtatgggtaacagaggcgttggggagagtgtgtgccgaacatatatatgcagtcatggaccagcccccttttccgcggtccccattggatggttacgcggtcagaagccaggatacggcaggagcatcagaggcgaatcctgtaaggctgaatgtaatcgagcatatctgcgccggtatgtatcctaaattaaagatagggccgggggaggctgccagaattatgacaggcgccccaataccggagggagcggacggcgttatcatgcaggagaggactgacgagggaagtgaatctgttgagatataccaatccgtcacagcttatggaaattattgtaaaaagggtgaggatacatgcagaggagccctgcttatggaaaagggaaggtcgatacgttcttcccacataggaattctctcaagccagggaattgagtccataccggtatattccgtgcctgtggcaggtatcatggccacgggagatgagctgttgcctgtgggaactcctctggagccgggaaagatttatgacagcaacggaccttttcttgcagccaggataaaggagctgggaatgaagcccctgcttctcggccggggaggagataataccgcgcagctggcgcgggaaatcagaaagcgattgacggaatgtgatgccctgattaccagcggcggtgtatcggtgggggtacgggactgtatgccttatgtggcagaagtccttggagcggatgtgttgtttcacggaattaacgtaaagccggggtcgcccatgctggcaatgatagtggaggacaagcccgttttctgcctgtccggaaatccctttgcggcggcagccacctttgaggtactggtgaggccggtcctggaacggatgcgcggaagatcgcggtggaaaccggagattctgcttggaatcctggaaagcccgtttcccaagtcttctcctaccaggcgtctggtgagggggaagatagaggacggaaaggtatggctgcctgagggacgccattcttcgggtatgttatccggcatggccggttgtaactgtctggtagatatcccggcaggaagcggcgggttaagggcaggggagcaggtgaaagccatgcttatgtagattggcatgaaatatttgattacggcggaaatcctctggcggggacttccgccgttttgtggtgaatcaatcattcatggtaccggacccttgtcatatctggaaaattatactataataggcgaaatgagcaaggaacaggcaggataagtgatatggcgggattcggtacgattgtgaacgtggcgggcatactggccggatgcagagtagggcttttgttgaaaggcgggcttcccaaacggctgttgagttctcggaagcaagattaagataggaaatctgctgccggctgtttttttgacagtcatcgtctgtctgatgggtttttaggaatccggcggccggcagttgggagctggatatggactgtaaggaatatacagttgcagatatacggagaggaaggatgaataatatggaatttgcaaaaaggatggaccggtttggagagggaatcttttcaaagctggctgaaattaaaaaggtaaagactgcaaagggagaggaggtcattgatctcagcataggagctcccaacataccgcctgcgccccacattatggaggcattgtgcagggcagcggcagagccctctaattatgtgtatgccatcagcgacagaaaggaacttctggaggcagtcagaggatggtacaatatccggtatggggtggaactggactctgaaacagagatatgttccctgctgggctcccaggaggggctggcccatatcgcgctgtccattgtggacgaaggggacgtggtgcttgtgccagacccctgttatcctgtatttggcgacggacctcagattgcaggcgccagacttcactacatgccccagagaaaggaaaatgggtatatcatccgcctggacgagatacctgaggacgtggccaggaaggccaagcttatggtggtgtcctatcccaataatccaaccacagccatggcgccggattcattttatgaggaactcatagactttgccaggaaatatgatattattgtgcttcacgacaatgcctacagcgacctggtgttcgacggaagggaatgcggaagcttcctgcggtttccgggggcaaaggaaataggcgtggaatttaattccctgtctaagacatacggacttgccggagccagaatcggattctgcctgggcaattcccaggtggtgtcgcgtctgaagctgcttaaatccaacatggattacggtatgttccttcctgtgcaggctgccgccattgcggcggttacaggtgaccagtcctgtgtgcaggccacaagacaggcatatgagactcgcaggaatattatgtgcgacgggtttacatccattgggtggaagatggagcggccggtggccaccatgtttgtgtgggccgccattccggagcattataccacctctgaggcgtttgtcatggaactggtagagcgagccggtgtcatggtcacgcccggcagcgcttttggtccctccggcgagggatatgtgcgcctggctttggttcaggatgagaaaatgctcaataagaccataagggctgtcagggaaagcggcgttcttttggaagaagggaaacggtaaatgccagagaacaggaacaggccagcattgaaccggtggcatgtggtgatactggtctatatatgcttcatatacggcaattcactgacaccggcctccatctcttcccaggaaagcggtttccttctggagaaggtccggggagccatggaatccctgggctgggagcatctgtggctgacggagcacatcatcaggaaaacagcccattttgcggagtatgctgtgctgggtggattgacggccagggcgtacgggttatacggaagacatagaatatgtaacagagacgctctgatgctgatttttatggttccttttgtagatgagaccatccagatctttgtagcggggcggtcaggccagataagcgatgtgtggctggatatgagcggggcagccgtggggatggcgatcgccgcgggagtgatgtgctgcctgcggaagaagagaacggtaagacagggaggcagagaatgaatataggagtgtggctgtcctatgacggcaccagatacgacggctggcagaagcagggaaatacagacagaaccatccagggcaagctggaggcggttctggaaaagctggaaggcagtccggtggaggtccacggttcaggccggacagatgcaggtgtccacgcagaaggccaggtagctaacttccatctggtgaagaggatgggaccggatgagattctggattatatgaaccggtacctgccggaggatattgccgttacaagggcatgcgtgatgccggagcggtttcacagccggttgaacgcggtgaaaaaaacataccgctaccagatagagacagcttcaaaaaagaatgtgtttgagcgccattattattatggcttagggcagaaactggatgtggagaagatggaacaggcagcggcaatcctcacgggaactcatgattataaaagcttctgcggcaataagaaaatgaagaaaccaacagtccgcaccattgaatccatctgctttgaacagatgggaagcagaatccatatatcctttacgggcaatggtttcttgcagcagatggtacggattttatcaggcacccttatagaggtgggagtgggcaagcgaaagccggaggaaatggcccgcatcctggaggccagggaacgctctgtggctggttttaccgccccgcctgaagggttattcctggaaaatgtggagtatggtgatttgatatgactgaatttttagtgagaagatttgtaagaaattatgacaatgtggaggatgtacggataaggacggcttatggaaccctggccagcatggtgggaatcggctgcaatttgcttctttttgtatccaagctttgtatcggcatcctggtgcacagtatatctgttatggcagatgcgttcaataatctgtcggatgcagcctcatccattattggatttgtgggtgtcaagatggcggaaaaaccagcggatgacgaccatccctttggtcacggaaggatagaatatattgcggcctttatcgtggcatttctggtcatacaggtgggattttccctgttcaagacctcctttggcaaggtgctgcatcctgaggatatgagcttccgatggatatccatactcatacttttaatgtctgtgggcattaagctgtggctttcctgttttaataaaaagctgggaaaacgtattaattccaaagtgatgctggccacctcggcagatgctctgggcgatgtggccaccacctcggctaccatatgctccatcggaatctatggggcactgggactgaatgtggacggtatcgtgggactcatcgtttctgtggtggtcatgattgcaggcgtgaacatagccaaggataccctggcacctctgatcggggaagccattgaccctgagatttatgacaaaataacaagctttgtggagagctttgacggaattgtgggcagtcatgatttgattgtacataattatggtccttcgcgaagcatggcatccattcatgcagaggtgccaaatgactgcgacgtggaacgtacacatgaaatcattgaccacattgagagggaggccatgaggcggatgggaattctgctggtcatccacatggacccggtggagacccacgacgagagggtggtggagtttaaggagttagtgacatctgtcctggacagcatagacagcaggcttacgtttcacgacttcaggatggtggatggcgcggagcgcatcaacctgatttttgatttggtggttcccagggaatataagccatcggttctgggtaaactgaaagcaaggatcactgaggacgtggcgaaaaaagacaggcgctgctgctgcgtcataaccatggaaaacagctttatctctgaaagccgggagtaagcttgatatgggcgccgggctggtcctggaagggggacgctggatgtcgcaggaagagatgatagaggccatgggagatggggatatggaggcgttccacctcttttaccaggacacggccaggcctgtgtacagctttatcctgtccttaaccaggaatccggaggaggccgaggatgtaatgcaggacacttaccttaccgtatggaccaaggcaggttcctatgttccccagggcaagcctctggcatgggtgttcaccatagccaggaacctttgctacatgcggttcagggagcagaagatgaaggcggatgtggcactggaggacctggctgagaatgaggagggggagtattgcgctcccctggaacaggctgcggaccgcaaggtgctgcttgacgccctgggccgaatcagccgcgaggagcgtcagattgtgctccttcacgcagccgcaggcatgaagcaccgggaagtggcggaggctctccagatgccgttggccacggtactgtccaagtataaccgatccatgaaaaagcttcaggagctgctcagatgttcccggtgagacaacggggtagggatggaaaaagggtaaaaacggccatgaattgtggtatcggtaaaaaacaaaaaagtctaatcggaaaattggataaaaaatgaaaaaagtacttgacgaaatgctgactatattatataatacatctcgttgtgttgatgggctatcgccaaacggtaaggcaacggactctgactccgtcattttcaaggttcgaatccttgtagcccagtttgttaaatcttggtcccgtaggcgttttgcctgacgggattttttgttatatttctgctttcggaccgggaaccctgcggggagggaacctggaggtccggatatccatggaggcaggaagccgcggagccgcgagaacgtaaagctgcaaagacatggagccgcggatacgaaaaaacagcagacgatggagagagggggaagacatgtctgataaaaagaagaatctgctcaatgggatattccttcttacagtatttgttctgaccatttacagtgtattttcaggcagggatttaagcgatatagcggacactatatccgaggcatctcccgtatatctgtttatgggagttggctgcgttatctttttcatatggacggagtctgccatcctgcactatctgttcggcaccctgggcataaagacaaagagaaggacctgctttctgtattcctccgtgggtttcttcttcagctgcatcacgccttcggcagggggaggacagccggcccaggtctactatatgaggaagaacatgataccggtgcctgtggccacggtggtgcttatggtggtaaccattacatacaaatccgtgctggtggtgattggctgtctgctggccatattcggccagggctttttaaaccgttacctgtacgaggtcatgcctgtctactatctggggctgggacttaatgtggtgttctgcgccgccctgctgattctggctttccacacctcccttgccagggacatggtaatgcggcttctgggacttctggaacatttccatttccttaaaaagaaaacctccaggacagagcgcctgctccttaccatggagcactataatgacacggctgccttcctgcgccagcacaagcatgtgctgctgggggtgctgttcctcaccttctgccagcggctggcattgttttcagtgacatattttgtatacagggcctttgagctaaaggggactgccatgcttaccctggtgcttctccagtcaacgatttccgtgtccgctgatatgctgcctctcccggggggcatgggaatcagcgagcatctgttcctgactattttcgaccctattttttacggggatctgctattgccggccatggtattgtccagaggtattgcgtattatgtacagttgggatttagtgcggcggtaaccatgtacgcccatcttaccttggtgagaaagcacagaaaaacctaaaaaatttattgaggtgtaagcacgtgaaaaactcagataaattgaagcgttacagcatgtttattgcaggcgtcatattcagcgcgctgggcatcagcctgattacaaaagccggactgggcacatcgcccatcaccagccttgcctttgtcctgacgtttcttccggcctccctgctgttttccgcctgtatagacggatggatgtaattttccatttctttatcgagaaggtatccaatccgctggaagggtggattcctgactactcggacgcagaggatgcctgcccgtaaggtaaaattaaaaaaatataaaaattaaaaaaatcaaaaaaagtccttgactaaatgccacaatatgggtataataaattccgcagccgctaatcaggacaaacagtcagggcagggcgctgcggataaactgaataatgggctatcgccaaacggtaaggcaacggactctgactccgtcatttcaaggttcgaatccttgtagcccagttattaatcccacagatgaaagtctgtgggattttgcttgtatacccaagggaatttatgatacaatgaatggcataataccggggcgggacatggaagcgccggcagcaaaagccgcgtcccggtcccgggagaatgaggttgatatgtatacatttaacagcagggtccgttacagcgaaacggacgaaggagggtgcctgtcggtttcaggcatcatcaattacatgcaggactgcagtacattccagtcagaggactgcggtgtgggagtgggttatctggaggccagccataaggcgtggcttttgtcatcctggcagattatgatagaccggtatcccaggctgggggagaggctggcggtgggaacatggcattgtgcctcaaagggcatatacggctaccggaacttcgttctgcgggatgaggaggggacggatgtggtcagggctgaatccctgtggttcctctacgatacggataagaacgtcccgatccgggtgcagcccggggacacggcgccttacggcgagccggagccgagactggtattaagcccctgtcccaggaagatacctgtgccgggagactgcgaggcaggtgaacctatcgtggttgccagacaccacattgacacaaaccaccatgtgaataatgcccagtatgtggagatggccagggaggccataccggaggggcttgtgataaaggagttacgggcggattacaaaaaggcggctgtattgggagatgtcctgactccgcgggtaagcatggcccggggaaaggactgccgggagtggacagtggtccttgagggcagcacaggagaaacctgcgctgtggtatggctgatgacaaaaggacaggaggaagattgagatgattgaattaggaaaagtgcaggagcttgaaataataaggaaaaaagaattcggagtgtatctggctgagaaggagggggatgaggcggctgttcttctcccaaagaggcaggttccggagggagccgggattggggacaaggtggaggtgttcatctataaagactcatcggaccgcctgattgccaccacgggaaagccaaaactgcaggtgggcgagacagcgaagctggaggtcaaggatgtgtccaaaatcggggcttttctggatatgggactggagaaggacctgctccttccgtttaaggagcagacccacccggtgagaaaaggggagcagtgccttgtcactctgtatgtggacaagagcagacgcctggcagctaccatgcgcgtctattcccatatgagcaaccagtctccttataaggcagaggactgggtcacgggcaccgtctatgaaatcaatgaaaccatcggggcctttgtggcggttgaccacaaatattacggactcattcccaaaaaggagctttacggcaggttcagggagggcgatacagtccaggccagggttacaagggtgcgggaggacggaaaactggatttgtgcgtcagggagaaatcctatgtgcagatgggtactgacgcagagaaggtattaaaggtcatggaccaattcgacggtgtgcttccctttaatgacaaggcaaagccggaggttatcatgcgtgagttcagcatgagcaaaaatgcctttaagcgggccgtgggcaggcttttaaaggaaggtaagattcgtattacggataagaccattgagcgcgtataagcgtatggaatggatagggaaggcacatactttagtatagcgtaaaatgtgccggagggatgaagtgtgtgtggctgcagacagcgcgggccggctccggtacatggggacatggattggggaaaggacggggagacatgaagaagaggaatccggcggtggattatgccatgattgtggcagggacattcctgattggcttagcaatcaagaatatttacgaccctgtgagcatggttacaggcggtgtgtcgggcgtggccatcattgccaaggagctgtggtctgttcctctgtggctgaccaataccgtgctgaacattccgttatttgcggccggattctttttctgcggctggcggtttatcaagcgcaccctctttgccacggtcatgctctcggtttccctgtatgttctgccggaagcgtcctatctgggaagcgacctctttctgtcagccttattcgggggaatcataagcggcgtgggaaccggcctggtgtttctgaccagctgcaccacaggaggtacggatctgctggcggctctgatccagaagcgtctcaagcactataccctggcccagatcatgcaggtgctggacggcctgattgtggtggcgggcgcctccgtgttcggcatcaggaccgctctttacgccctcattgctatcttctgtgtggctaaggttacagacggcctgatagagggacttaagttctccaaacaggcttatattatctccgagcattacagggagattgctgaggccattatggaacagatgggaaggggagtgaccagcattaaggccaggggcatgtactcggatcaggagaagaggatgctgttctgtgtggtttcaaaaaaggaaattgtgcggttaaaggagattgtggcggagtttgacagcagcgcttttgttatcgtaagcgatgccagagaggtatttggtgaaggatttatcgaatattaagccctgaattttgtggcttttgccgatattttttggaaaaacgcagttgattaacataattaacaaaaagttagcggcaaatattggaatactttgtgatttaggacatttttttttcctcgtatacaaattagctaaaaccccaattttgattttgtggaattgcgatatggattccccagggggtttaatgtattataagagcagttacaaaagaggataaaacacatatgtgttaagcgtattatttaggaggaaaagacagaatggctagtttatcactgaagaacgtaacaaagaaatatccaaatggatttgtagcagttaaggatttcaatcttgaaatcgccgataaggaatttatcattttcgtaggtccttcaggatgcggtaagtccacaacccttcgtatgattgccggtctggaagacatctcatccggtgagctctacatcgacgataagctggtaaatgacgttgaaccaaaggacagagatatcgccatggtattccagaactatgctctatatccacatatgtccgtatatgacaacatggcgttcggactgaagctgagaaaaacaccaaaggatgagattgacaagaaagtgcatgacgcagccaagattctcgacctggagcatctgctggaccgtaagccgaaggctctttccggcggccagagacagcgtgttgccatgggacgtgccattgtccgcagccccaaggtattcttgatggacgagccgctgtccaacctggatgcaaagctgagaggtcagatgcgtgttgagatttccaagcttcaccagagactggagaccaccattatctacgttacccatgaccagaccgaggccatgacactgggtaccaggatcgttgttatgaaggacggcatcatccagcaggtggataacccacagaatctgtatgacaagccatgcaacaagtttgtggcgggattcatcggagctccccagatgaacatgatagacgcaaccgttggcaaggacggcgctctgacaaccttaagcttcggcggacgcaccgtagcactttcagaggctaagtccaagaagttagaggacgcaggatacataggaaaggtagttaccctgggcatccgtccagaggaccttcacgacgaggaatcctacctggctatgtctccaaagagcgtatttgaggctactgtccgcgtatacgagatgttaggctccgaggtcctgttatactttgatattgaggacgcaagctttgtcgctaaggttaatccgcgtaccaccgcaaggcccggcgataccatcaagctggctatggatttagagaagattcacattttcgacaaggatacggaactggttgttcttaactaatacaaaagaaccgtaagcgaaaattaaggtaaaaagaagcaggagagtatacaactctcttgctttttttgtgattttgcattaaaatatgaaaatagggttattagttactccgaatacgtttgaaaaggagagtatagaatgatttcaaatcagatacttcaaaccacactggatggattaaaagcaattacgagaattgatttgggtatatgtgatacagagggaaaagtgctggcttctacatttaccgatgcggaagactccgagagctcggttctggttttcgtggattcaccggcggacagccaggttatccagggataccagttcttcaaggtgtttgatgagcaccagctggaatacatcctcttagcaaagggggccagcgatgatgtatatatggttggcaaactggccgcattccagattcagaacctgctggtagcatataaggagcgttttgataaggacaactttatcaagaacctgcttctcgacaacctgctgctggtagacatttacaacagggcaaagaagctccacattgacacggatgtaaagcgcgtggtctacatcatcgagactcacaacgaaaaggatatcaatgcgctggagacagtgagaagcctgttcgcgtccaagacaaaggatttcattacggctgtggatgagaagaacattattctggtaaaggaagtgcgtcagggagagacctacggggagctggacaaaacagccaacaccgtattggacatgcttaacaccgaggccatgacaaaggtgcgggtggcatacggcaccattatcaatgacatcaaggaagtctcacgttcctacaaggaagccaagatggcgctggatgtaggcaagattttctacgccaataagaacgtcatcgcttacaacaacctgggtatcggacgtctgatttatcagctgcctattccgctgtgcaagatgtttatccgcgaggtatttgacggcaagtctccggacgagttcgacgaggagacactggctaccatcaacaagttctttgagaacagcctgaatgtgtccgagacctccagacagctttatattcacaggaatacccttgtataccgtctggataagcttcagaagagcactggactggacctgcgcatctttgaggacgccatcacctttaagattgccctgatggttgccaagtatatgaagtatatggaaagcctggattattaggccggagtcggtggatgatagagattagcaatgtgagcaagacctacgagacagggaacagggccattaaggatgtatcccttaccattaatgacggtgagttcgtgttcatcgtaggaagaagcggttccggcaagagtacgctgatgaagctgctcctcaaggagctggaacccacaaagggacgtattgtggtgaacgatatggacctgggaaggatgccgggaaggtatattcccaaataccgcagaagattaggcgtggtctttcaggatttcagactcctgaaggaccgcactgtgtttgagaacgttgcatttgcccagagggtaatcggggtgccggccagggtaatccgggagacagtgccggagatgctcaggctggtggggctgtcgtccaagtacaaagcctaccccagacagctgtccggaggcgagcagcagagagtggccattgccagggccttgatcaatgaccctgaggtgctccttgcagacgagcccaccggtaacctggacagctttaatacccatgaaatcatgagacttctggaggaaatcaaccagagggggactactgtgattgtggttacgcacagtcaggaaatggtggatgagatgaacaagcggatcattaccatggaacgggggtcggttatcagtgatgtgggcggatattattagggcgttgccccaggggctttggagagcttacgggcatgctttttccgccggaaaggcaaatgaacagcaatgagaatcagtacattttggtattgcctgaaacagggcatcattaatatatgcagaaatattttgttttcgctggcatcgatagcgactatttctgcatgtatttttttattctgtctttttttcgccctgatagccaatgtgcagaatgtggcaaagacagcagagacaaccgtgggaatcactgtattttttgatgaggatatgccggaggaccagattctggctgccggcgatgttatccggggctgggaagaggtgcgggaggcgcggtatatatccgctgctcaggcgtgggagaactttaagacagagtattttgaggggatggaggagctggcagagggatttgcagatgacaacccgctgtccggttccgcctcctatgagatatttcttaatgatattgaggaacaggataaaatcgtggagcgtctggagggcatggaaggcgtgagaaaggtgcgctattccagtacggccgtggccggtctgaccagcgcgggaaagatggtgggggccatgtcggccgtgattatctgcgtactgctggctgtggcggttttcctgattagcaataccatttccgtggccgcggccttccgcaggagggaaaatgagatcatgcgcttaatcggcgccaccaactatatgattcgtgcgccctttgtggtggagggtgtgctccttggcgctttgggggcggcagtgcctctggccggcatgtatgtgctttatcagaaggcagtcatctatatcggtgagcactatcagatgctggcaggcatgtttgaacccatacccctgggagatatattcccctatatggcggccgcagccgggtgcctgggtgcgggcattggttttttcgtcagttattttaccatccaccgtcacttgaaggtatagggaaggaggatgtgaatgaggatgagacattggatttgcgcggcagcgctgtcaggcggtcttttgataggcggtacggcggcatttgcagcctacgccaccagtgtggagatagaggatgccaagaagcaggtatctgccctggaagaggaaaagaagaaagtggagagcaccctgagccagctggagggattaaaggcagatacggcagcttatgtaaagaagctggacggcagtctgtcctccctggcagaggagctggaacagctgggaaaccggatcaccctgaaggaagaggaaatagatcaggcgcagatacagttagagtcggccaaacgcgaggaggagcatcagtatgacagcatgaagctgcgcatcaagtatatgtatgagaacggtcagaacaatctgctcgatatggtcatggaggccggcagcatatcggaactgctgaaccgcgcggaatacgtgagccagattgcggaatacgacaggaaaatgctgacagcctatgcttctgcaaaggaacaggtggcttccagggaacagaaccttgaaaaggagcatggcgagcttctggtgcttcaggaatccacccaggcaaaacaggcttccatgcagaagctgatggattccaagcagaaggagctggactcatataattccaagattgccatggcccaggatgaactggaccagtacaatgcagatatcaaagcccaggaagaacagatgaaacgaatcgaggccgagatgaagcggagggaagaagaggccaggaaaaaggcggaagcagccggcaagacgtataccgtatcgaatttggggaatattagttttaagtggccctgtccgtccagcagcaggattacctctaattttggagacagggagtctccaacagaaggggcatcaagcaaccataagggaattgatatcagcgccagcacaggagcggatatcatagctgcggctgatggtgaggttgtgatatctacatacagctattcggcgggcaattatattatgcttgaccacgggggcggagtgagcacagtctacatgcactgctccaagctgctggtgggcgtgggggaaaaggtggcaaaaggccaggtgattgcaaaggtaggttccaccggttattccaccggttcccacctgcattttggaatccgctcaggggggacctatgtgaatccccgaagttatgtaagcccgtgacccatcataggatagaaggaacggacagataggagacgtaaattggaaaatcgtgaatttgacagacaggaacataatatgggcgggcagccggatggtccctacagggacaacgggccggggcctcaggacgggaatcgcaatggggcgggaaagaaccggttctggtccggggctttggtgggagcccttgtaaccgccttcataggattgattgtggtggggatgtcggccggtatctatatcttcggcaagagggtcatgagccgtcagcccagcgtggccatagagggtaagagaccgggaatcacagacggaagcagccataaagagggtgtggattttgaccgggttacggccaaaatgtccatgattcagcaaatcatagatcttcacttcctgtacgacgaggacgccggcaatgtggaggattttatttacagagggatgctggccggtctggatgacccttattccacgtattacacggaggaggatttccgttccatcaatgacagcacaaagggaacctactccggtatcggagccatgttaagccagaacagaaccacggggctatgcaccatcgtgaaggtgttcgagggttccccggccctggaggcagggatgcagccaggggacattatatataaggtgggcgataccctggtggcttccgaaagccttgatgtgctggtgaacaattacatcaagggcgaagaaggcacggacgtggctatcacggtatacagggcggacaaggacgagtatgtggatatgtccgttacccggcgcaaaatcgaggtgcccaccgtggagtacagcatgctggacgataaaatcggccggattacagtgtcggaatttgacgtgattacagtggagcagtttgaacaggcagtggatgagcttcaaaaggatggcatggaaggcttaatcatcgacctgaggagtaatcccggcggagtcctggacagcgctgttaagatggtggattatattctccccgacgatttggaccggtataaaaaggggaagggcaagaccctgattgtttacacggcagacaaaaacgaaaagggtgatgtatacaccgcctcagacggccatgagctgaaaatacccatcgccatcctggtcaatggagactcagccagcgcttccgaggtgtttacgggagccctgaaggattatgactgggctaccgtggtgggaaccaccagctacggaaagggaattgtacagaacctgattcctctgggagacggttccgccatcaagattaccacagcccactattatacacccagcggttttgacctgcacggaaagggaattgagccggatgtggaagtggagctgaacgaggaacttaaaacccaggccgtggtgaagccggaggaagacaaccagcttcagaaggcagtccaggtattgaaggaaaacaaataagcagtatggaaggagctccggtcatgtcaggttatgaccggggctttcgtactgtctgcgtaccctggcagaataaaaacagagcataaaaacgtagcaaatggcatgaaaatgatatatatatcgaatagtggcaggtaatattattacgttagttcgggctacatacaattactgtcgaattaagctagaaggagattggagcaatgaagtttggtcattttgatgaagagaaaaaagaatatgtaataacgagaccggatacccctgctccctgggcgaattatctgggttctccggagtacggcgcagttatatccaagaatgctggcggattataaagggattcattcagaagcaagatattttgttcctctgaaccggtcttatgaggtttggagcttatgagcagattgtagactggatcaaagattccaaagaatggctggatgcacagtacttcaataagactgtaaaaggtcagtggaacgatgactggaacaaaacaatgggttcagagtcaaaggtatttgcattctctggagtgacgactaaacattttgcatgtaataaccaggaagataatcgaatgggtgtagatgcttgtgtttcagagcgggccctacgagagatttatttccgagggtttgaaattgctgtgaagaaaagtgcaccggtgtcaatcatgacatcttataatttgataaatggtgtacacgcagcaaacagtcgggacttgtgtaccgttgttgtccgtgaagaatggggggaggggaggcacaatcatgtctgattggaatacaacagttccggaggatggaagtgagccgtggaaatgcgcagctgccggaaacgacattattatgccgggaaatacaaatgatgatgcagatattcgggatgcatatgaaaaaggattgcattcggaaagagaaatccgaagctgcgcgggcagaattattgcaatgatcgataaattggcaaaataaatattatagagtcttgaaaaaagctcaagccaactgtggcagtgtattgcattttgcgggttcaataatatttaggcgtttgcaaaacgccagaacccgcctcacatgccgcataccatttcacgggcagatatttctatctgctttgttttcatgtctaaactttaggagtctgcggattgggattctcctttcatattttcatcttttttacgttcaagcgcatcacgatataactccataccaaggcgaatatggtaacgacagtatataccagccatttccttatcgtttgatttaatcgcctggagcatcttgtaatggtaggtgacgccgttttgatagttttgtcggcgggagccctttgagagaagcttttggtggtcaagcatattttcgtttaaataattcattattttgataatgaacttgtttttactgcccagagcaatgaggtggtggaattgattggaatagtaatccttcttctcatcatcatggtactttaacatgttataataactgtcttcgagcgcttgaatttcctctggggtggcccgctcagtgaaaagctctgtacagtaaggctctataataatgcgaaattccattaattctagaacatcttcaatattcagcgcaaagtatttggtcccttccagtgaagcgttgtccaaaatttctacataggtgccggaacctcgtacttttcttagaacagaaatagcggttagattggcgatggcatctcttactgcaatacgactaactccaagatatgaacaaaattcattctcggaccagattttatccccagacttccattcaccagacaatatgttctgagtgatgaaatcacttaccttttgactagcgttgtggttgtatgacattcattacctcctggaaaaatgatagctgcacggctgttggtgcatatattacttttattataaaacaaaatggaaaatgaagcaatgtaatcctaaaggcaaaattaatattataagttttttattgtattgtgcataatgaattataaataaaaataaatttatatattttgtacaaaataacggaataatgttgctgagttattgacttgggtataaatatgtagtattattttgttgtatttaatgaggtggaaaacggtactatataataaggaggattatgatgaaaaaaagtcagatgatgtcagtattatgtgcagcttctatggtagttagtttgttgacaggctgcggaggggaaaataaaccggtaaattccgagaaaactgagattgccattgaagagacaaaaagggatagtgcagaggatgcaaaggacgatggtcagttttataagttaaatttcggtcacacattaaccgaaaatgacccattccaccaagcatatctgaagtgggctgaggcagtaagcaagaaaacaggaggaaaacttcagatagaggtttatccaagttcccaactgggggttgaggaggatattctggagcagatgaaacaggggaccaatgtgggctggcagacagatgcagcgagacttggaaactatgtaaatgagttcagcgtgttgcttgccccctatttcttagagaatatggatgaggttaaggagctgatggattctccgacaattgcagaatgggagaagaagctggaggatgagcataatataaaggttatctcttttgggtttgttcaaggttacagaaatatatatgcaaataaaaaagccactaatcctgacgagatgaaggggctgcagattcgtaccgcaggcgctcctgtctgggttgcgggtattgattccctgggttgcaaagcagtttcgttagcgtatggcgagatgtacaatggtatacagacaaaggttgtggacggctgtgaacttccttatattgcagccaataatttaaaaattcaggaggtggcaaagtatattcttgagacccagcatatctatcagatgaactttatggtatgttctgctgagtggtttaacagtcttcccgaaaattatcagaggattctaaccgatgaatgtaacaatgcaggtttagaggtatccgaacagatgcaaaaggattccgacgcggctaagcaggctatgattaacagtggtatggagtatgttccggccgaccaaatggacattgcagctttcagaaaggctagtcaggaagcgtatgataagctgaatctgaatgaagcaagggaggctgtttataaagaacttgggaaggaaatcataaaataaagagtgggaagtgattacatgaaggagttttacaagaaattttgtgatgttgagatggcgcttgcaattatttgtctggtaaccagcgtggttgtgatttttattgcggctgttatgcgtgcagtggggcatccgatcaactggggaacagacattgcgctcctgcttttctcatggagtaccttcttgggggcggatttggcgtttcggcagggaaagctgattaatgttgatgttataattaagattcttccacaggatattcagaaattaatgaagctgataatttatgtaatctgtcttgtcttcttatgcagtatggtttacctgggattcctgcagtctgtaaaaacttggtaccgatcatttcagggaataccgtttcttagctatacttgggtaacattaagtgtaccagtatcatgcctttccatggtagcgacaaccattatcaagattgtccgaaccatcagaaaccaggatgaactgacatttttgtaggcaatcaggtattaaggataatgtgccggatattcttgtctggcacattgttataatattaggaggttaacttatgattatagtaatgattacattcctgattttgctggtagtgggtgtaccggttggattttccattgcaatctccggttttacttatttttttcagcatccggaactgccaataaccacggcagtacagctgcctatttcccagactcagaatattacacttcttgcagtgcctctgttcgtgtttgcagggagtctgatgaatgcttcaggaattacagacaggctgatagaactgtccatgctgctttgcggacatatgaaaggaggcatggcccaagtaagcgtggttctgtctgcgctcatgggcggcatctctggttcatctaatgctgatgcggcaatggagagccgtatcctggggcctgagatggagaggcagggttatcccaaggggtatacaggagcagttattggctatacatctcttattacctgtaccattcctccgggggttggaatgattctctatggaaccacgggggaggtgtctattggacgtctgtttgcagcaggtatggtggcaggactgcttatgactgtgattttgatggcgacagtgggcgttacttctcgcctacgcggatttaagccggccagagaatcaaaggcaggctttcatgatatcattcattctcttaaagacactatatgggcattgatttttcctattctgcttttggtcggaattcgattcggtctgtttaccccatctgaggttggctcttttgcctgtgtttatgcgcttattgtgggcttttttatctataaaaagctgaatttcaagagattgattgaaaccttgaaggaagcggttgtggatgttggggcaatcatgttcatgatttctatgtcaggtatttttggatatggcataccctttgacaaagttccacagaaaatgacggcttttatcacaggaattacaacacagccattagtggttatggcaattatcattattgctcttctgctatttgggatgttcatggaaggctctgttgtcatacttcttctgacgccaattcttcttccgatggtaaagagctttggatttgatcctgtattttttggtattatcgtttctacggttgtcaccacgggcattttgacaccgccagttggagtggctatgtataccgtctgcagtgttctgggatgcacgatgcctgaatttttaaaggaaagcatacctttcctcattgccatcatagctgaagtggttttgttatgtctttgccccgagattatactttgggcgcctaggttgatgtacggaggatgacaatgaatgaagtggcggagggtgaaaaacgtataattgaacagaggtattcagactttttcaaaaatgcaggatatcctcatcatataaggaagggagaaaagcaatgaaatatgttgaattaggaaggactggtgtaagagcttctattctgggaatgggcggccatgagtaccttcaaaatggaaaatctaggggatttaacgaggactttaagcgtagcacgactccaggagagattttagaaggttttggtcaggaaaaccgtctggcgattttaaagtcctcctacgaactgggaattaatttttttgatgtaactcaggactccgagaaagaggcattagggcgtaatttgaagcagttgcctcctccctatgatgtcgtaatccagacacgtcctgagggtatggtttatacctatgataagaataataccaaaatggcagatttgattcttctcaggaatgaggcacagagaatcttaaagcttcttcagagagagactattgatttttttaatattgctcccatgaaatgtgcatttgagcatgatccggaataccttgaaaaactgggttataatatatctgttcttaagcaggagggattgattcgattcgcttgtgccgacaccttttccggtgaggaaacttatctcagaatgattcaatcgggttattttgatgtaatctatatcaactttaattttgctgattatcaggctcaaaatagggtgatgaaggctgccaaggctcaaaagatgggggttattacaagagaggcatatatgaaagggcagttgttccacatggcgaaggaagcgggcattgaacaaatttcggatttagctgatgcggctcttagatggtctttgtcacgggagggagtcgatatggtgatttacggaacaggaaaacctgaacacttaagagatgcgtctgaggcatttgaaaaaaagttttccgaattggatgagaggctgattagtagaatcatgcaaacgcagctttacaaagcgtatgaggctgaaaaaaataaagaatttctggaactgtaaaggagaaagtaacatggaagaattatattacaacagggtcaaggaaattttaaagaagaagggaagggtatctgccgcgtggcttcacatggccagcaatgtatctgcggaaatattggcaaatgcaggctttgacgtgttggtgattgacgttgagcattcaccagtagattaccagacagtgtttagtatgtgccaggccatgaagggaacgaatacagtaccttttgcaagagcaccgtggaatgatctgattgcaatcaagagaatctgtgattgtggagtcatgggtattcacattccttatgtaaggacagtagatgaggctagagaagcagttctgcgctgcaaatatcctcctttaggcatcaggggcattgctggaagcccaagagcatgtgggtttggtatgaacagaggacagtatatgcaaaaggcaaacgacgagaatattgtgatgattgccattgaaaccatggatggaattgataaccttccggaaatgatggagattgaggcgctggatggtatttttataggccctatggatttgtctgcctctatgggaatcaggggacagtttgataataaggaatttaaggctgccatcaaacggattgagaatatagtgataccgtctggtaaattcctcggcacagtagccaatgatatagaagatgctcagatcttgtatgataagggctacaacatagtatatatgatgtctgatgccgttgacctctctagaatggcagaaaggacagtcgtcaaatttaaggagtataattcgaaggagggaaaagtggatgattaatgccccctcgcttgccaactgcggtctgtttacaatggccgaggagatggatggaatgattagagggggagtgaattttgtacatatagatattatggatggacattatgtgccaaatatattttttcctctatcaattgtacaggcagttaggaaacgttacccaaacctgacgatagatgttcatctaatggtaacaaaccctgaggattatgtggatagaatgagggaggacggagctgattacctgagctttcatattgacagcactcgcttttccagaagactgattgacagcatccaacagtcgggaatgaaagcgggggttgttatcaatccttcgcagcctatttctctattggagcctcttgtccgattcgtggactatgtggtgctcatgacagtagagccgggttttgccggacaaccttttatgcatgacgccctcgaaaggctggatgaactgcagaaactaaagaaagagacggatacccattttatgatatccatagatggaggaatcgaccgtgagcattctgcagaatgtatgaagcgcggggcagaaattctcgtttctggtatttatactgttttcggtcagccggagggattggaaaaggcttgtgccagttaccagaaagagatggagacgattcagaaggaggctggatttataggcctgggcgccatatgcttatgcgagaaagaaaacatatcgtaaagttattgtgttaacaaaaggatggaaaaggagagaacaggatgaaagacccgattcagaaatatttttatataggtaccattcaatggatgacccacccgccgatgaaatacaagctgctggattccatcaagacacttgtcgcagatgagttttttacagcggtcgagatcacgaaaattgaggacgaagcagctagaaaaaaggtcagaaagatgttggagcagtcccacatgaaggtttgttatggcgcacaacccaggatattaggcccaaagttaaaccctaatgacatggatgaagaggaaaggttaaaagcagagctaaccttgattgaagccattgatgaggctgagcagatgggagctaagggaattgcctttttggcaggaaagtggaatgagaaaaccaaggatgaagcatatagacagttgttgaagaccactcgtaatctttgcagttatgcaggaaaaaaagggatgatggtagagcttgaggtgtttgactatgatatggacaaagctgtgcttatcgggcctgctccttacgccgcaaaatttgcagctgatatgcgttcaacccatagtaactttggactacttgtggatttgtcccatttcccgaccacctatgaggactccagatttgtaatacagacgttgagaccatatattacgcattttcacattggaaatgcagttgtaataaagggaagcgatgcctatggcgatatgcatccgcgctttggttatccaaaaagtgcaaatgatgtggcgcagttggttgacttttttactgtattgaaacaggagggattctttaatgtacagaatccctatgtgctctctatggaggtaacacctcgtccagatgaagacggtgatattattctggcaaataccaagcgtacaatcaaccgcgcatgggcattggttgaagattaagggaataatagagaatgctgtttatggcacagaattagcgtgataatattttatagaaatgaggaggacatgaatgaaaatcgttattttggatggttatacagagaatccgggagatttaagctgggatggctttgagaagctgggtaaactgacagtttatgaccgcaccgcagactcgatggagatagtggagcgcattggggatgcgcaggtggtttacaccaataagacacccattacaaaaaaaactattgagtcctgccggaatttgaaatatattggtgttttggcaactggttataatgtagtagacgtgaaggctgccaaggaggctggggtgattgttactaatattccaacttatgggtcggatgctgtatcacagtttgcaattgcgcttttgttggaattatgccaccatattggtgaacatgcagagtgcgtgaagaatggggattggactaacaatcctgattggtgtttctggaaccatcctttggttgagttagcaggaaaaacaatgggaattattgggtttggtcgtattggacaaggaacaggaagaattgcccaagcacttggaatgaaggttcttgtttatgatacgcgtaaaaataaatctttagagagcgcaacctgtcggtatgtagaaatggatgagttgctagctgcttccgatgtcatttccctgcattgtccattattcctggaaacgcagggaataatcaacagggagagtattgctaagatgaaggatggggtgatgattataaacaactctagggggcaattaatagtggaagaagatttgagagatgcccttaacagcggtaaggtggccggggcagcagtggatgtagtttccacagagccaatcaggatagacaatccattacttatggcgaataactgtatcattactcctcatatttcttgggcttctaaggaatccagacaaaggctgatgaatattgcagtcgataatctgaaagcatacataaatgggaaacctgtcaatgtaattaatgaataacccaagcttcgagagtatgaaaaaaagtctgtaaattgagatcttctatgataagttaatgagaaaggtaggtggatgtcgtgaccacctacctttactatacggatgcttttggattctgtcaagatgtattggaaaatcccatcaaattatggtacacttcttacaggaaaacatcaggaggtgtgccatgaagctaaaaacagacgatccctttgtacctgaagatatcagggcaaagatcaatggactgcagtccctgctggatcatgcagccgacttatacagtgatatctatagctggtatgacagtgaactgaaatcctatgacccgaaagccaccgcagacgatgaactgtttgaccctggcacagggactgttgtggaggggatcgattacctgtctatcatggaatccctgtcagagctgcagacagccaacgaatgtaaaatgcagagggattaaccttgtgtcccatcggcctggcctctggcgatgtcttcccgtatcagggccttgatggccccttggacggaagtgtccctgccatatttgtgctgtctgacccaggccaggatatctgcatctgtcttcatattcagttttaacttcacctgtacagtattatagctgtcgtacctgtcctgagcatcgtattttgaaaatccatacatggaaagctcctttccggataggtgtacacctatgcctgtgcgctcttattccggcagtctgccttcgtacataatggacagttccccatagacctgcccccagttgcggatgggcatggtccacttcttcgtcgcctcgaacgtggccaggtacagagcctttaagagcgccgtgctgcccgggaacacgctccgctggcggttgagcttccggtaggtagagttgaggctctcgatcgcgttggtagtatagatcaccttcctgacctccatggaaaacttgaagatgggggataccacatcccagttgtcatgccagcgtttcattgagttggggtactttggcgtccacttttccgtcaccttctccagcgcctccagcgccttttcctcgtttgcggcatggtagatggttttcaggtccgtggcaaatgctttccggtccttgtcggagacgtatttcagcgtgttccgtaccatatgtacgatgcagcgctgctgctccgtcttcgggaatgccgccgttatggcttccttaatgcccgtgagcccgtccgagcagagaatgaggatatccttcacaccgcggttcttcaactcgttcagaacgcagagccagtacttggagctttcattctccccgatctgtatgctcaggacttcctttttaccttccagcgtaaggccgaggatgacataggcggcaagcttgcggattaccccgtcctcccgcacggaataatggattgcgtcgatgtagaccacgggatagacttcctccagcgggcggttctgccagtcttcaatctgcggcagtatcttgtccgtcacgtccgagatgaacccttccgaagcctcaaaaccataaatgtccatcaaggtatccgagatttggcgggttgtcatgccttttgcatacatggatatgatcttctggtcaatgccggaaatgtccttctggcgctttcttaccacctggggttcaaacgtggacttcctgtcctggggcacctggatgtccatgctcccgaagctgctgttgatccgcttgggcttgtagccattgcggtaatcatccgaatccgaccgttctgacctcccatagccgagatgctcatccatctccgcttccatcatctccttcagggtgctccccagcaggtctttgagggcttcctggatatcctccgcagtctggatgtcatactcttccaggagctgatggacgatgttccttttcccctccgtcatgactactttgtgtacgggctgtttttctcttcttgccataataataggcctccttatgataatagattttatcatagaagacctaatgcttaatagctatttacagaaaaactttcatactctccaagcttcttgcttgtggtcacggtgcccagagatggggcagtggttttcgcactcaaatttgatatgggcgggaagccgtttcagggctttcccgccttgattacattagaaccgaatttttattggattatatctgttacccaaggaaccggctattatgctcgccaaaccgttcatatcagcttatgctttatcaataaaattcatttgttatccccttacaaatcaacttctgttatcttctctattttcctctctgcggtgcagaggatttcagcagttcggattactgtgcaatccgggtaagccgctgtttttcttcctcggccatccatctcattcattctttgtattgcgttttctctgagctgcctgaaataaattttcctccttgatatactccctgagcgaatccacgtatttctctgacagatgcactacaaaattgtcagcatcaattggaatccctttatccgtcatctggcggatggcaagagtcattttccatttcccgcccagacattggagtatgtagtgatagggattgacttcgacaccgcggtttgatttttttggcatggtgggtacctcctttttggtatgttttctttccggacatgcggggcagagtatgcctatgaggacaatcctctggaaaaagtttactacgtattagagggggaaatgacggtaaaggacaatgaggggagcacctatgtgattcacaaggatgaatccatttcattcaagccctttgagggcagatacctgaagaatgaaagtaaccttccggcccgtatgctggtcattatcaactacccggaagcatgataaggaggaaattcagtatggtggatttttacaaagactatgttgcaaagatgttttccattgagggcaggacagccattgtcaccggcgccaccggcgccctgggaggagctatcgcggcagcctatgcaatgtgcggggcaaaggtggtgctcaccggacggaacaaggaaaagctggaggttcttgcaggggagatacgtgatgcaggtggagaggcgctgccttatgcagccgacccgtccgtggaagaacaggtaaagggattggttgcgtttgccgcaaaacagtacggcggcctggatatccttgctgtttcccacggatataacaagcctcagaacatactggaccagtcggtggaggattggcgatgctgacgaatacgtagttttcataatagtctcataagagggaagaatggtatgtaaaaaggacattcctgctcgcgacttgacaaagttatgggtaagcttatatatttgtaactgtacacatgaaatagaactggaggtattatatgaaaaaatggtatgatgaggaatatgaatgggaaattgaagttattggatttttgcgcggcgatcacacggagcggtattgccgtaatggagaagagattggcgataagtacacttgcacgtatggctgcccggtcaatcaagatggacatggcatttgttctaagtgcatgatggttatgttccctattatggaagctgtcagaagcggtggagatttagagaatatcggtggggacggaaagtacagtaaaactgtcgtatgtcctgatgggtgtgtcatgtttagacttacggcaaagccaacaggcaaaaagaatttctttaaagggaaattttttgactaaagtgacgcgctttgcgctgtaagtgcacagaggcataaagataaattaactgcgcaaggcccgaaaagagaaaatagtgcattgccagtttaaggagaaatatgctatggataagaagttcccgcaagaagccaaaaaaataatggacgaaagatttggatatgatacattaattgcccttgctgcgcttggtgataatattccaaatgtagggatggttttgcaaagaagataacacttcaattgcgcaaaaattgagaaaagcatttagcgaatggattgacaacggacacaaagatatgatatcggtttttagataattgatgagaggagtatcagttctcagaattaaaaaatatagcagttaatagggggagatgacaatgaaaatagagattggtaaggattttccgcaatactttaagccttcatatccagaggagtttgcattattttcgcattttgaaacgactgcaggtatacctacagttttatttgcgataactacatggaaagaaaatggaaagccgaatgtttgttttcactcatggagctgctttcacggagataagactgcattctttgctgttatggggaatttgtaccagcatacacatacctatgcaaatatcaaaagagaaaaatgcttctgcattaattttctcccgataagttattatgataaattaatagctacgattaaccataacgatttagaagcagatgaattcgcaataggaagttttacacttaccaatgcgaaaacgattcaagcgccagtcatccaagaggcatttatgaatatggaatgtaccctgaaagatatacaggatttaagcggcgcaggaattacggctatgattgccggtcaggtacagcatatttcgattgaggaagaatacgcacaggcttatgaaccgcgatatggaaaagcagggtttatgatgctaataccagctcctcaaaatcttattacgggggaacccggtcaatcagcaattgcgacggtcaacatagaaaggcttgattaaacatgggggaccttagcagtgtttgcagcaatagggcagatacagataacgccgcagaccaagtggcgggatatgaaaatgtgattgcaccgcataaatgctatacgaaagctatgaaaatgaggagtgaggttatattatgagcgttgagaaaaaatacatctctgatgtggaaacaatcttatcacacagacatgataatggtgcggatttttggactactatcgatcacaaattattaaaaggcgcaccttataccaccttagaaagtatattgtatctactggaattaggcgtatcgcctgatgatgaagtgatgaagaatgctgccggacttatcttcagtaactggaaagaggacgggcgggtgaaaacttctccgacaggcgggatttatccatgccaaactgcgttagctgtcaataccctatgtcatatgggatattcaaatgatgacaggataaaaaagtcgtttgcatacttccttgatacccaacaggaagacggtggctggaaatgtaataaatatagctttggccggggcgaagagaccgaatattcaacaccctataccactttggttgtgttggatttgctgcgctattccccatattttaacaaggatgcccgattagataaggctgttgattttctgttggaacactggaatatccgtaagcccatcagtccctgccactatggaataggcacattgttcatgcagattgaatatccgtttcgggggtataatctgttttactatgtgtatattctgtcattctatgacagcgcgaaggaggacggacgttttcttgaagcgttaaaggcactggaagataaaactgtgaatggggaaatccctgtggaaagagttgtgccaaaacttgcaaagcttaatttttgtaaaaaaggcaagactagtgagctcgcgacaatccattatcaagaaatattaaaaaatattggaagaaaaggttagtgcttactatatttagcagaaaaatgtccggtattagcccgttgcgattctgaaattctacatggctgtttgtatgcccatactcctacagcagtggaccgcccgtgttaatcaaaatattcccacctatcggggaagacccaagcatgacgggaaagccctaaaggactttcccgtctattttattttgagaaaggaaccttctcacttacagggactgcctgttctgcaagcagtgcaagaggctggaggcgctggtgaacgcgtacggatataccaatctgaaagataaagcattatgatatggaaccttaccaatttgtatatgccgggcatctgtccggcattctccttctaccgtgtttcctttgcaaagggagttcgctgcttggttttttttgacattaaaatgctatatatttttttgcacggtaaagaacaggaatgcaagtataatttacgaaataaaaaaccaagctaaaaggaagccttatacgggcttccttttctatatttcccggcaaaggaagaaacaaaaacaatcaaggaggaatgaacatgttgaaacgagcaattgcaggcaaaacgattgaagaatactgtctctggctgcagcataatgagatgagccagggaaccatctataaatacagatattatctgaaccagcttgaacagtttatggatggggcggcagttaccaaagagagggtcatggtctggaaggaaacacttaggagaaatctgtcgccggtgacggtcaacggcgccctggctgctgtcaatggattttttcggtatctgggatggaatgactgtctggtcaagtttataaaagtaaaacagcaggtattttgttccggacaaaaggaactgaaacgggaggaatacctgcagctggttgaggccgcgcaaaaagatgggaatgaacggttatgtcttttaatccagaccctgtgctccacaggaatccgcatatcggagctttcctatattacggttaccgcagtggaaaaacagattgtccaggtggactgcaaaggaaaggtcaggactatcttcctcacccggcagctgtgcaggcttcttaaggagtatgcggagaaaagaaaagtacagtccggccccatctttgtgacacgcagcggaaagcccatggaccgcagcaatatatggcgtgagatgaaaaaaatcggaaaaaaggcaggaattaatccgcaaaagatatttccccacaatctacggcacctctttgcaagggtatactacagccaggaaaaggatctgctgcggctgtcagacatactgggccacagcagtgtcaataccacacgtatctatacaatggaaagcggagagaatcatgtcagacagttggaacgaatggggctgcttatagaacattacaacagaattcctcttttgttgtaaactttcccattgttactgtctccccatccatttaatcctttgaatcctctgagggaaaaataaaataggcacaataaataagctggaaaaaaattgatttaaaccagcttatttattgtgccttaatttcaaaaaacgtatgagacaatcacattactatggcaaacacaaaaaatatgtagtataatagctccaaacaatatccttctgtttacaacaaaagaggaattctgttgtaaatagaagccaaggtactttaagtgagggagaagaagagatgggcagtgagattatacaggacgaagaggccatgaaacgaattgaagaactggtggtatcggaccggtccagcaccatgctggtctgtgtacagggaaccgaagagggggagctgtgcggggaaatttacagctgttaccttaaggaccccatatggtttaggggagtgggggatttggtgctgaagctggatgaaatgtgcaactgggttggtatgccccatgcaaccacggatccgcgtttcctgaatctggagacggagaggcgttacagggaggccagttcccatcatccgcaggctgacaggagcaacctgacgtacaccatggaccagattccctttaagcaggcgttaaaagccagggaagtgctgattgtctatgtgaaatacagacagttctccagtttacagggaagcatcagaggaaagattaccaagggtaaggtggtaaatttcagaagtgccctggaactgatgcgcatgattagcatgatacagctgtaaaccaggggcggggagctttcagtacaataagctccggcatatgatgataaaggaggcggaccgcatgggcggtaagattctgcgtgtacagatgctgggtaaatttacaatgcggtatggggaagaccacatactgtttcataaaacaggcaatgcaaaatccgtacgtcttctccagatgctgctgctatcaggagagcagggaattgcaaaaagcgagattatggattttctctatgggtggagcgaggggactgacgcaggcaaccgcaataaaaacctgaacaatctgtgttaccggctcaagggacagctggcggcttccggccttccggaggaggaatatgtggtaatacaggatggggtatgcaggtggaagagcagttttaagattgaactggatgcggcttattttgaaacactggtacataaggcggaaggaagccggggacgggaacgggccgcgctgttccttcaggctaatcaaagctattacggagagctgctgcccatgaaccagtccgacatgtggttctatgagaaaagcgaatcatttaagcgcctttatatagagacaatccgggagctggagcaggcgtttaaatccaatcatgactaccagaacctgcttaaactttacaccagggcatctgcgatttatccctttgagaattggcagacagagcagatacggtgctgcctggaaatgtacaggtatgaggaagccattaatatttataacaggaccatggaactctacgcaagggagatggggaatcccccaatggaagagatgcagaagtgttttgaagacctggaattgtttgaacggaaacacaaacggagcgttcaggcatggcacataacgagtcagtattatatggaagtcgggggggggggtataatcgggaccatatttgagaaaggcaatatcacgggagcgtattactgcacctatccaagctttgttgactactgccgtctgctgcttcgggccagggagcgccatgacctgaagccggtgctgatgttcctcaccttgggacagcagggaaaaagaagagggcaggataaccgtatatatcagatggagctgctgaaagacgcaatcggcagttccctgagaaaaggggatgcttatacacggtacggaagccgccactatatcctccttctcaccaagattaataaggaatcctgcagtatcatatttcagcggattgaatccgcctacaataaggtgccaggcagccggggagagctgtggtatcacgtgaccatgacccaggaactggagaaaactatgttggaatagaacctgtatcgccattgcattgccggatggcgatatttttgcgtcatccatagaaaaatgggaagaggcaccagatgtggcaggatgcgggatacccctttgataaagtgaggtacggaaaccgtcactatatcctccttctcatcaggattaaaaaggaattctgcagtatcatatttcagcggattgaatccgcctgcaataaggggcccggaccgccggggagagctgtggtgccatgtggccatgtgccggaaactgaaaagattatgttggaatagaacctgtatcgccattgcattgccggatggcgatatttttgtgtcattcatagaaaaatgggaaaatgcaccggatgtggcaggatgcaggataccccttttgataaaattaacattaaggaacgatgccctggattaagaaaaatataagagtttgcagaacatacaggaggtaaatgatgaatcggagattggaagcgggctggaagagaataacgtctggttttttggcgtttaccattgtgagcatactgatactgggcaattccggtattgcatttgccgaagaatatgatgacaggttctaccgggaggagacggatttgtcggagcttggcgaattttccaaggccacggtcagcaatgccagctttaaaaattcaaaaaaggatgatgttgtaatcagcattctttcagaggagggggattaccgtccaggaggtctggttaccctggatgtacaccttaagaatgagacaggaaccgtggtcacagacggctcactgacatatagcgcaaaggggattcaggaaggctcggcggagttttctcttttggaggaatcaggagaggatgcgtttgataccggcatagtggatgacggtgcaccggacaatggtatggcagatgacagtgcattggacagtggcatagcggatgatggaacagagggactggaacggattgaggggattgaactggttcccggacagatatattcagtacgttttacatttgtcattgatgaagatattgaaggggtacgaagccagcaggtaaaaatccagtttgacggaaaaggcgaagaaaaacgaatacgcgtccgtgagaattttttatatacagtcaattatctgaacatagatcctgttgaatttcaggatggaaaccgcataggaacaggtgaaatggtcactatgggaatccatgcatccatgtttgattttgatgcaatcctggaagattcctttaaggatgagacagatattgcacctgctacaccgtcagaggctaccccggccgttccactggctacgccatcggaagcacggcctgccacaccgtcacaggcacggccggatataccttcaaagccggcaccagagacgccggaagaaggcgcgggcataccacaggaaacggaaccccaggaacccgctgatacgggggaaagtcagatccagacttccatagaaacattgccgacagcggcagaggaagcgcctgccaatccggaggaaactgagacccaggtatctgctgaatcgtcacccgctgatacgggggaaaaccagacccaggcagccacggagacagagccggccgattcagaggaaaccacaatccaggcatcagccgaggcagaaccaacagaagcagcagacacagaagcagcgccaaccatgtcatcagaacccgttcaagaggattcaacagaggcagaggtgacagatcaggaccaaagtgaagaaatggaatctgaatctgtggttgtaattgaatcaaaagcagaagattcttcaaatgaacataaaggcacgactgcggaagataccagggaaacccagaaagatgcagatgaggaggaaagcgaagattatacggtagaccttgggaaagtaaattacaggattgaaatgtataacgccaagttaaacagctttaaggtgagaaaggcaatggtggatgatgttagggagaatatgctgatttgttcgttccgcgtgtccggggatgtgaatcctggaatctactttggaaaaatcacccaggagagcaggataaaaggaaagacctgcaaatccacccagggtttttcactgattgtaacaggtgatggggaaatctccctggaaggccggattggggatgctgccgtcacggtcagcgggccggtggattccttccctgaggcagaccagctggcagtgagcgtctctgaggtagagcaggatcagatggcccaggtggatgaggcattggtgaagaagtctcaggaagaggggctttccatccaatcctacaaagccctggatattaagctctacgcggacggagctgaggttgaaccggtagggcccatcaatgtagcttttaaaaacctggagctggaaaaacgtaatcctgctgccgcgtccaacgcccaggcagatgtaccggcggctgcccaggtgctgccccggcaggaggaaccggcggattccagtgaacggctccaatccggaggagaggaaatcaaagtctaccatctggatgaaacgcaggctgtggcaaatgagatgaacagcacggtggcatcagacggaactgtagtgatggaaacagaccacttttccatatacattgtggtcaatgtgccggaggtaaaagaagtgcctgtgacagtggagcactgggcccagctggataagatgacctttgacagtaacggtaaaataaaggaatctgtctccgggaacagactgtatccgggagcccaaagcggaagcacgtatgcaaagcaggaggtaaagatatacagcgatgataacctgaccctgcccaatggctctggcacagggttggattactccattgcggtctccaactggagtaaggtcgccctgggaggtaattatacggtaaaaagcgtgaccataaccaatgcaaattaccccaatggacagacatttacggaaactgcagcagaccagaagatttatctcgctgccacaaacaataagataaagattaactatgtgcccacatcaggcaccattaagggatatacaggttttcacgactataatgttacggtggagggaaccaccacggatggaaaccatggaacccttaacaccagcaaggtgggaatgaacaatacctccctgggaaaaagctccacccgcatcggtgtgggaatcggagggaacggccaggcacagatacgccatggttatacaggggtgccaaacaaggcaggttctgtggtggcagggattcccgaaggaaccctggccgcggacaatacgattaagtttaattatcaggacccgggcctttttgcaacccgggatatcaccaccagtgaaacatataaggacggtaaaaaggtgacctattatgccaagaaatacctgccaaactatcagctggggtttgaacgccagggggatacttatacgctgaagtccgtatatgacagttcgggaaaaacacttttgaaaaacctggatcagattgtatatacatgtgacaactggaacaaaaccaagaaactttattccaatcttttctggcctttggacaatgtcagttacgacaatgcggttaagggaaaaaacagggaccctctgtttggctataaccattacgggtttcctcaaaatgatgaggacgtgaacaaaaaggggattacccacaactggtttttcggaatgcgctatgactttgagtttgtcctgggagattacacagggcctatggactattatttcaggggagatgatgatttctggctgtatgtggacggtaatctggtaagtgacgttgatctgggaggaatccattccgcggaaggcgcctatgtggatttgaagtcatggatgcagaacaagggctttctaagggataaaaaccagaaacataccatgtcggtcttctttatagagagagggggaaccggttcctgctgttacatgaaattcacactcccaagcgtcacatccatcccaaccccggaatctgagacggtttcccgcacggtccggaagctgtggctggatggaaacaatgaggataagaaacggcctgaatatatctatgtccagctgaaacaaaatggcgcttcttttggtagtgcggtcaggctggaggcatccaacggctggaggtatacgtgggataacctgcccaaatataaagaagtaaattcaaatgaggagcatgtttataccgtagaggaaatcggcaacattgttggttatgcatcaagcatcaatgggatgactattacgaatacacggatcacggatatcaatgtgaggaaacagtgggttggcagtgccggagaggagtctgtccaggtgggattgtttaaggatgggagcacaagaacaggtgatatcatcacactggacagctccaataactggtccggcgtatggcagaacctgccggggtatgactccggagggacaaagattaactatgttccctatgaggtcgattcctccggtcataaggtggaagccggaagcacggtgcggattggggaggggcaatatattgtcacttacagcagcgaccattctgtgataaccaatacttataatcagaaagacctgacagtgaaaaaagtatgggtggattatgaaaatgcctaccatacgcggcctgagatattggaggtccggctgtatcagaatggggcggcctttgatgaacctgtaaaactcagtgaagccaaccaatggacggcaggctggaaagacctgcctgtaaaagccgatggaagctccccgccatatgtttacacggtgagagaactggaccaggcgggccagcccatagaggatggcagtatggcagtactgtccaccggatacacctacacagcatcctacgattccagcggtacgggtacatccgccaatccgtttaaaataaccaatacccttttggcggcaaagctgaggatcaaaaagacagtggaacagaacggccttgaaaatgaacccattgattctgcctacaagtttgtgatacaggtcctggacagcaagggagctgtctatacacagactgctcttggaaatggagaggaaagcggggcaatccttgtgattcctcccaaggaaggccagatcttttccattgcggagatcgtacccatggaatacaccatgtcacgtatggaaagccaaccggcagacgcgctctcaggagctgagaacggggataaggttacagtgaaaccaggtgacgatatcctggtcattcttacaaacacccctgatcatgagagctatttccatcacaccgcatcagtcaccaatgtaaagggatttacaaatggggagggaacggatttcaggccggagaacccatttacagaatatcatggaagtgacaatcctcagtatatggcatcggcctttacctcggactgcatcatggcgtttattgaagacagaggtgtagcgcgcggccagagaaaactggagaaaggagatgatctttatggataaaagaaaggtcttatccaagctgctgccaataatcgtgctaatatccgtatccattgcagccggagtaacaggcgccacggtcatccactccatgcagctggaaaatcccataaagacgcctgtagtagaagggggagtaacagaaaacctggaccagggggcgaaggaggtttcttttacaaataatggggaggcagatgtatttttaagagttgcatttgcacagtcatgggttgcacaggatggcacggtgctccctaatcatatagtggatgcatccggccggtctctgcctgcggctgtacccagcctttcattggacggcaattgggaaagcggggaggatggatggtattactacaaaaaagtgcttcccggttccgtatcaggcatccaggaccgcagtacggaaaagctggtccgcggcgtggattttatagatatgtcagggatagaggatcagcggtatcaaaatgcggagtatcaattccatttcacaatggaaatcgtgcagtccagcgatgactggaatgtcagcaggaaggctgtgcagcggctttttgacagggacatttcagtgacgccggataactgggacggcgataaatatggatgcagtattaactggaattctgattccggaaaaaattaggaggtggttgttttgaaacgattagagattcatacatggctgaaaaacaaaaagacagccggtctcctgatactggttatattgctcctgtcatttgcagtcacattggcatattacaatgatgtgctgaccctggccaatcccctgggaacttcccacagcggggcggccatggtggaaagctttgacccggaaagctcgttcctgcccggagagacagtgattaaaaaagtttcgttccaaaacacaggtaaaatggacctgttcctgcgtgttgaagtacctccacaggagaactggtaccaaaagggacaggggagcagcccgcctgttatccttgaaaaggaggccggctacgatacggatcatgtgatcaaacattggaatccgggagtctggaccgattccggccaggaagagggaaatgtagattatatgaacatggagactgcgttctggtcaaagtcatacacggatgagaacggaaagagctaccggtattataaacaggtcctcccggcaggggaaaccacggactgtatccttgagagcatcagcctgagcgatgaagtgtcaaatgaccggcatgacgtggattacagcgataagatttataaactgaccttccatgcagaggcggttcctgttgaggaacatgattcggcaccgggggtacagtcacagtggaatatggtggttcaggaagacagcagcggcgtactgacatggagtcagggcagccgggccggtgaatgatacaggaggacaggagaatgagaataaatggaaaagtgatagcggtggccgcaatgctggcagtggccgggatcggcgggacatttgcttactttaaccagactctgacagccgccaacatatttgatacagggaaatatgatacggaactggttgaagagtttaagccttcggagggcgagaactgggggcctggaaccagtgtgaataaggatgtgacaatccgcaacacaggcacccttcccgtggtggtgcgggtgaaatttcaggaaaagtgggtcagaggacaagaggaattttattttacagacacctctcaggaaaaggagcggccggctgccattggaagcccatccaatgccaacaatgcatttgagaatgtttaccagggtgacccggaagacggaattgccaatcctgacgcggatgactcagtggtatttaaaagcatgatgccggacggcggctgggtatataatccggcggatggatattattactatatgtatgtccttcccggcgcggtagagaaagaggatggcagccaagaaattgcggagacaaccaagctccttgacgaagtggccctggcggaaaatgtggatatgggttcctacaaggagacccggtattatgccaccacgggtcaaagaccggaaagtgagagcagcgactgggtggaattcgccacggccagcaatgcgtccagccctcttggatatgattacatttccaccagggaaatgaatgagcgcctgaaagcggatggaagccagataacctttatgaaatcagtcactaagctcagagatgccaggctggccgggtacagtgatgctgattataccctggtggtggcagcccagaccgtacaggcaacggaccaggccgttaacacggtatttggaggcgggggtgtatttgattttaggcagcttggatgtgattggaagctgatcagcgaatcagaggtccagaagtaagttcagcagcctaaaggagaataatcaaacaggttattaccgtctgtgtttttagatggacggaccaatataacaaaatgaaagcattataatatgaaaaagcaggaggaaaagacatgaaaaagttaaataagaaagcagcagcaggaatcgggctgggagcattagcgctggtgggaggaacatttgcgtactattcacagacagcgtccctggataacccgctgagcacgggcaaatataccacccagctggtggaggattacacaccgccaacggaggatttaaagccgggcgccaagtgggataagaatgtaggggcggagaataccggagattatcccgtccttgtcaggataagcatgaaagaaaactggtcctacaagaaagcagcggattcctataaaaccattttgagtgattcagacctgtttaacaacggaacctatgccggcggaatctttgatgcagcccaggataatgataccgatggcctgacaccggaatcggacggcaccgtggtgcataagaacatcctgactggtgatggctggattgatggaggggacggatactggtactggaacggcgttctggagaaaaagggctcagataagtccggcaccacccacctgctggaaggactgaccatggctacagatattgaccttggctgctatgagacaaaagagtactatgccgttgcggcaacacagccggatctgcataataccgatgcctggacactgattgactggaccaaggttaatgatgagaatgatgacggccttacagatatacgcgacctggcagctgtcataaatattccggagggagagagcctgttccgcaaatccgaatccaatttagacagcgataggaagggctacggagactccaactacacactgaccgttacctctgagtttgtccaggccacaaaggatgcagtgaccgattcctggcaagatttcgatatcactaagttgaccaatgtccaggttaatgcagaggataacgtaaatcttgagaataaaacggttgcaccataatacagaggccgatgaatgaacgttctgaaacaattgtttaatatcctatcatggcccgtgtatctgtgcattgcgggataccttctgattgcagcgcccatgctggccggttaccggccggtggtggtgctcagcggaagtatggagcccacctttcctgtcggaagcgtaatttactataaagcggcctcctttgagcagattcaggagggagaccccatcaccttccatgcaggtgaggatggctcgctggtcacccacagggtagtggaaaagcaggagctgagcagtgattttatcactaaaggagatgccaatgagactgcggatcccaacccggtttcatatgaccgcgtggcaggcagggcgtctgatgtgaagattccctatgccggatactttgtcacctatggcaggacaccccaggcaattgggagcatgggaggaatcctggtgattgggatattacttgattttatctgcccgggaaagaaacgggaggaaaaggcataaacgcctgttggaagcagagctgtaatccgtttggacaggagattgatgttatgaaaaaaggcaaaatcatgttattgggcctggcagttctggcggctgcatcggtgggaactacctgggcggcgtggtcccaggtaatacggaccggcaatgaatacagggttcccaggtacaaaaccagccttgaggagcatttccgccagccggatgactggcagccaggtataaccacacaaaagcaggtatgggtatccaacagcctgaaggcagaggacggcagcctggagagcggcgtgcctgccattgccagggtggaaatccaccagagctggatacggcgggaaaatgtttacgtcctggatcaggatggcaatgagacagcggtccctccccttgagggggaagcgctgccccctgactttgtgacagaccagggagagcgtcagtatgcggcaatccccgcatttaataaagaatccgtcatggtgctccggtccggaatggcgcaggatgccggcatgcgcctgaatctgccctatgcagacaaggtggaggaggccagggaaaaatggctcctggtggatgaggagccatcggagacaggaaattatatattgtattacataggggtgatacagccgggggaagactcgccggtgtttttggaaagcgtgaccatgaacccccttctggagaacactataacgggaaaagacacctattatgagaagacagaggatggttacaagcagattaccgtgacccgcaccaatgccaaatacgggtatgacagcagcagatataccatggatataaaggccaccacggtgcaggccaccaaggcagcggtggagcatacgttcaccggcgggtttaaccaggaagtgatccgatacctggccgatcaggtggcggatcccggcgtctatgacgcctccggcctggaaaagaagctgaccctggtctacaactggggaagccagaggcttgagtatgtaccctaccgctcagggaccggggaggaggaagggaactggttcatgagttttacggacatggtgccgggaggcatctacaaagaccgcctgaaggtggagaataccacatccaaccagaccgccagagtctatatgcggatcgatccaagagtacaggagcagataaaagacgagctcctggaaaagattaccatgaaggtcacattccagggcagtgtcctatatgaaggaaaggtgacaggcgccagatacggggaaggtgagaacctccaggagctgattcccctgtgttatctgaaaagcgggacatctgaggaaatccaggtagagctgcagctggattcctccattacctgtgacccggtaacgggagcgtgcatctatgccgaccagctggccaagattgactgggaatttatgattcagacattctcagaaaatggcggcggcggtggcggtggaggcggtggtggcagaggcagaggccgaagaagtgtaaccaccttaaccaccattgatgatgaagcggttccacaggctgttatgattcctgatccggagataccgctggcttctcttccaaaaacaggggacaccaccccgctgcttatgctgggagccatgaccgcggtcagttttctcctcctgtccgcactgggaatcttatggattaggatgcgcagaaaagaggataaggcgtgaaggacaaaaagcaggggacgggacacacggtcctgaccctgtccatactggtggtactgggaatctttctggtgtccgccggcctgctgtgccgctccctgtatgaatacagaaaaggggagaaggagtacgggctgctccagcggtatgcagccaaagcacctggccgggaacctgaatcccggtccccgtacagcctgtctgcgggggagcaggaacccatgctggctgttgattttgaggcccttaaaaagctgaatccccatatcattgcatggattcatattccggggacgccggtaagctaccctgtgacccagggggaggacaattcctattacctgaacaggacattttccaaggcatataacggggccggatgtattttcatggattacagaagcagtctgccctcagagggcgggaacacggtcctctatgggcataacatgaaaaacggctccatgttcggttccctgaagcgttactgggacaatgaatattatagggaacattcctctttttacctgtacacggcagaaggggagattttcctgtgccatattacagaccgccgcaggatttctgcgcagaccgactttttctctgaaatgcaggataaagaggaggaaccgggggaagatggcaaaacggaccgagatgccagggtcacactggtgacctgcgtggccgggaaaaatgaggaacggctggcaatagaggcagatgctaagaagattttcgtatattggcagcataaacagattgcatctgccttgaaaaacctaatttaacctgattttgttgttttttcaaggaaccttaaccgataaagcctcagtaaatttatatttttccaccatatatgcttgaacggagcttaagattagacgataggagtccgccaggttcttggcaaacgcttcgtggtttccttcacacaaacattgatatgcattccttgtgatttcattgagctgctcaatcacaccgattccttgcggataaaacgcgagataaaatccccattctgtaattcggctggtttcaatccaaatgacgttcaatggttttaatgacagccgttctaaaatcatctgaagcaaatcagtaagaaagattcccggtttcctgatatgggcagccaattggtttaaatcatctgcactaaattgaggtgcggtataggctgcgaccggatacgacaaaagcgccatgagctgcaacgaatgaaggtatgtaagagcctcctgcttcgttgtaaaatccaacagggcctgttccgtattaagctgatcaggagtcagaaccaccgtacccttgccatttaatgtctttgtatagcctctgcgttccaacagccccaatgcctttctgaccgtatatgccgacacaccatactgctttgccagctgcgcttcatagggcaaataggaacctgctgcataaatacccgttcctatcttccgggtcaggtcacggacaatacgggtgtaataataatttctcccccttaagggattccattcaaatgtacttgatacctgtgcaggaaccgttgagacattgtctgacatttgattgaagatttctgaaatgatgtcatacatgtccttatagagtgcctttaaatgatgaaactgctcaaccggattccgattttgtaatattgcaatgatatattttggttcaaaggttggccttaagcggatggagccccgggaatagatgcttttttccaaaaagtaggcaaaattcccctgaagctcaaacgccgtgtgcaggtcacataacagaggattttggctggcgccaagaatatctcgtgtcaatgcaattaaagctttccagctctcagcgttatccccggaccgcgccgctttttgagcctgccgataatggggcataatctcaatggagcaatcccgtgcagcgaatacaagcaggtaaggcaataataattcatatgtctcatatacctgcagaatatagtcccgctgctctaaaatcgtggatattcccgggatttgcaagtcctgcgatagaactacaggtgcacgccttatctggatatcaatcaatccttccgcctttaaggcatcaagggcccgcgtgatggtagcaattccaacattatattcttcgcatagatttctggaagatggcagcttactgccgggccggaattgtcctgagacaattcgtctttttaaatcttcatatacataagaaaatcgggtttcctgacgtttcataaaatagctgcctttctaaaaaatacaaatatgccctcaatagacaaggagcgttctatccattatactataaaattatgaacataggcaatgtctatcattcatcagatgccacttaaagaaattacaggattttcatcttgagtattatagactgaaatgataaaataataaggcaaaaataaatgttagttaagaccacattggaagcgcggtccaaagggccgtaaaaatctataacaacctatttgtataggtgagcagattggttgaagctaactggttttataaaagaattcattggagtgattatatgtcaaacgtcaggccccaattgaaggttttaatcgtggacgattctgagttaaatcgagagatgctgggctctatgctgggagatgaatatgaaatagtggaagcagaaaacggggcgcaagcggttgatatattgcgtgaaaatgcatccaacctgtccctcgtcctgctggatattcaaatgccgcagatggacggctttgaggtattgatacatatgaaccgttttcattgtattgatatgattcctgttattatgatttccagcgaaatttcgccccaatttatagagcgtgcatatgagcttggagcaacagactatattgctcgtccttataacacggcgattgtacgccgccgtgtagccaatgttattttatcctttgcgaaacaacgccagatgatggaaattattacccatcaaatcagtaaaaaggaaaaggataaccggctcatgctttccatcctgtcccatattgtagaattccggaatggtgaaagcggacttcatgtcctgcatatcaatcttattacggaccttctgctgaggcagctcatgttaaaaacagaccgcaataaaatgacaaatgaagatatatccctgataagtatggcctcggcactgcacgatatcggtaagatatcggtcccggaagagattttgaataagcccggccgccttacggcagaggaatttcgcatcatgcagggccattctatggcaggcgcgaatctactcatggacttgccgattgaccggaatgagcctttgctgaaaacggcatatgaaatctgccgatggcatcatgaacggtatgacggcagaggctatccggacggcttaaagggggatgccattccgctctcagcacaggtggttgccctggcagatgtttatgatgcattaaccagtgaacggtgctataagccggcatattcccacgatgcagcaatgaaaatgattcttgacggacagtgcggagcctttcagccattgcttttggaatgcctgcgtgacattggagatacgcttgaacaggaactgacggtccaaaatatgctggaagcagaaaacacgcccaaagaaaccagtcatattacagaacagctgcagcactatggtctgggggattcggaacggctgctgcgacagcgttcatatgaacagcagcattttcgtttcctgctggataaaaccgaggagatttttttcaattatgcggttgaaccatctattttatgtttcaatcaatatggagcagaacatctaagcatagggaatgatttattccaaccgctggagaacgggaatctgttaagatgcattgataaagatgtcctgaatcgtatcgtggagaaggttcaggaagcaactccggcgcagccggattttcaaatggatgtgccgcttacaattaaacaggagaatcaatggtttcacggcatctttcatgttatctggacaaatgaaaatgtgaaacactatgcgggtgtcatgggaaaacttcggaagattgatcagaaccatatgccagatacagagcgaacatagatgaggcaggtaaccaacaaatcttggaatttaacagtcatggaatatggggccaaggaaaccagcttgaaaatgggattgcagctaacggtatgtctggcaaagagaacctgaccaaaattgagtttataaaccagaatgtctatcatgtacggtcaacctatgtggaggttgacggttatccgtatttactggaactggttgtccagattacagaggaaacccatatggaccattttaacgccattaatgacacatatggtcatccggttggcgacctggcactaaagcaggcagccaaagcgataaaaaattgtgtaaaaagaacagattccgtggtgcggtttggtggggatgaaattttcgttgtgtttggggatataccgtttcatatgcttcaagaaaaactggaagaaatcagatcctgcgttgataaagctgttattccggattatccgcagcttaagttatccatcagtatcggcggtgtttacggaccaggccaggtttcggatttaatggaggcagcagacaggctgttatttcaggtaaaaagagaaaaagccggattgaagataaaggagaagatgaatgaacggttgtaaacgggttctgtctattattttaatcagcgttattctgacaggctgcagccaacggtccagtgaaatcatgctgattgaaagtgaaccgtctatgaaacaagagcatatgtttctgtctgtttacggatataaggcagacgtacgcaatctgatagcgattgaaaaaatattgaaccaatttatggagcaaaaccctgatatcattgtaacatacgaaggtgtaaaggggattgattactggaaagccttagaaagacgggcagaggccaatgtgctggatgatgtatttatggttgatcatgaccgggttatggatatggcggataagggcaggttagcagacctgtccagcctttctaccattgagaattatcaggataggatgaaagagcagttcatcagagaggacggttccgtttacttcctgcctatatgtatatcactctacggactgtacatcaactacagcctgctggaagcacatggacagaaggttccggaaaactggtcggattttatggaagtctgcaactattttgcggcaaaaggcattacgcctgtcatagcaaataactatgcctcgctcagaaagcttatcgctgcgaaatcactgtattcggtgtatcagcaggataccgctgcggcaatcaaagaatttaaccgcgaaccggccaagctggcaaatacattgcggccgggaatagaaatggttgaagaaatgattgaccgtaaatggattgactgcgcagaagtcttggaaacggaacaaacatccgatgaccttcagctatttgtggatggcaaccggccgtttatggtaaccggaggctgggctgcggccagggtacaagatatggagcctgacttttcatatggcgtacacccgtttcctattctcgataagggcagtgtgctggtggtagaagggaacacctgcatcagtgttaacgccggcagcgaacacctggaagaagtcatgcggctcatcgagtgtatcacgcagccggattccatatgggaatactgcgacagccaaagttcctatacaccattgcaggatgatagaatgcctgctgataggacaatccttccggccgctgaatgttttgaatgcgggcggattgtgataggctcagattttaggctggacctgccactggatgcctctctctctgaaataacgcggcagatgctgaaggggatgcccgcggataaggccgttgcccggctgaatcagcttctgacacagtagcgtccggaggaaatgataatgaacataaaacgattttggataaatggtctggttgtaatgattctcggcagtattctcgtaggctgttattactatataaaaagcgttcagacttccctgtggacgcagaatgcggaacaagccctggagattacaagtcagggcggccgcgcatttgagacttatattgaaattgaacaggaacgggtacacggtctggctaataagatatcagaattagaatctcatgaggaaagcaaaatattaaataatttgaacctgctcggcggtgagacgtccaattatacggttgttgatttggaccacgggtttatgtactcaaaccgtttagaagaccggcgcattcttagtgcggaggaactggcattttatcataccttttccggtaagggtatcagggaaaactatttaaatctctacgatgggcagaataccctgggagtctatgaatgttttctgtttgccgacggcgcgcatggagtcatgcaaaaaggggagaaggtttcggagctgtccaaaaagttttctatttccttttatgatgacaatggtttttcttatattaccaatcagaagggggaagtcctgattcgtccttaccaaaaaaacagcaaccggacgtttttaaatatttttgacatgattgcagaagaaaataatgaggaggacattcaagccttcaaggaaagtttatccaagggacattccggggtcatccaattctcctttaacggagcaaagaacatcgttaccttttcaccaatagaagtcgtggatggctggtatatcatctccgtaatcccaagcagcgttattatggaatataccaatcatattctgcagtcgtcccagatatttatttttgttgtctttattgtgtttatcattggtctcatattccagctttttgaacggcacagccgcaagcgtattgaacggaaggagcaggatatacaataccgggaactgatgttcagcattctttcagaacatatagatgatgtgtttttaatgttgaacagcgggtcctacgcggtagaatatgtgacgcccaatgtaaagcgtgtgcttggcatctccccggatgatgtagaagcagacattaaatccttaggaaaagccacatacatagatggaaagaccgtctcttatgcggagttgggtttgatggaatcaggccagtcgattctgctggaaagtgagcgtatgcatcgaaagaccggggaaaaaaggtggttttatgaaaccgtataccgggtaggttatggccaatcggacaagtttattgtggtgttgtctgacaggacaaaagaccggcagagtaagtttgctttggaaacggcattgaatgcggcaaatgccgccaataaggcaaagagtacctttttgaataatatcagccatgatatccggacccctatgaatgcaatcgtaggtcttaccgtgctgttaaaccatgatgccggcgattcggaacgggtaaaggaatatgcccgaaagattacagcttccagtcagtatctcctgggtttaatcaatgatgtattggatatgagcaagattgagagcggaaaaacaacacttaacatcacggaaatcaacctggcagagcttatagaggagctggggaccatgatccggccgcaggccaaagcaaagcagcaggaatttgaactctttctggcggatgtgacatcggaacatctaatcggtgacaggatgagaatcaaccaggtgttgataaacatcttatcaaatgcagtaaaatatacaccggccggcggccgaatccgaatgactgtaacccagcttccgcaaaaaacaaaagattttgcccggctgcggtttgaggtccaggataacggtattgggatgtcggaagagtttttaacaattatttttgaaccctttgcccgtgaaatcaatagtgtgacaaatcaaatccagggaaccggccttggaatgcccattgtaaaaaatttggtagagctgatgggcggaaggattgatgtgaaaagtaagcagggcgagggaagtatctttaccgttgaactggaacttcgcatccaggaccagaacgtggatgagggattttgggaaaaacacggaatcacccgcatactggttgtagatgatgatgagaccatctgtatcaatgtaatccgtgtcatggaaggcaccggggtgtccgtccaatacgccctgggcggcgaccgggctatccgtcaaatcaaacagtcgcatcaggaggggaccccatttgaccttgtacttctggattggaaaatgcctgatatggacggcatccaaacggccaggaatattcgggcgatgctgccggaacatataccgattatccttcttaccgcatacgaatgggaggagattgaggaagaggctcttgcggccggctttgatggtttccttgcaaaaccgtttttcctgacaagctttaaacaggcgattgtaacggttcaggcaaaggagcaaaaaatgcctggtgcagaaggttcggattgcaggctgtcaggtgtaaaaattcttgcagcggaagacaatgagttaaatgccgagatattacgagagctgcttcatatgaacggcgtgatatgtgatatcgttagtaacggtcaggaactcttagacgcatttgagaaatccggctccggccagtatgacttgattttaacggatatacagatgcctgtcatgaatggatatgatgcggtcagggcaattcgggccggccgtcatccccatgggaagataattccaatcattgccatgacggcaaatacgtttgcagaagatgtgaaggaatcggccgatgccgggatggacgcccatgtacctaagccgattgacatgaaacatctggaagcagtgatagcggaactgataaaaaagaaacaaggataaaatgtggaggtatttatgaatctgaaggaatgttacagaaagctgggcggagattatgacgaagtactgacacggctttacagtgaggatatgataagaagatttctcattaagtttttaaacgatggaacttacaagcttttattagagaagcttgaagcacaggattatcaggaagcatttcgcgcggcccatacgttaaaaggggtttgcgataatcttggattgtcaaatctgcgcaagtccagcagcatgctgacagaggcactgcggacagggaatccttctgaagatttggttgtcttgaagaatcaagtctgcattgattatgaacaggccgtttctgcaattcaggcattaggataatgtacctgtatcttaggaaaggattaataaaatctctattatttaataatacattcgttctgcatacctaatataatatgtataaaggaatgaaaaggagcgcggtgctttgaatgaaaaaatactggttgtagatgatgagaaagaaatagcggatctgatcgaagtatatttacaaaatgaaaacatggatgtatataaattctactctggtgaggaagctctttcctgtatcaagagtacggattttgatttggccatattggatattatgcttccggatatcagcggcctttccatctgccagatgatacggagtaaggaatatacatatccggtaatcatgctgacggcaaaggatggagagacagataaaatcaccggacttacactgggggcagatgattatatcacaaaaccgttccttccgctggaactgatagcgagaataaaagcccagcttaggcggtataagaaatataatgtaaattccgctgctccggcagcagagaaggttcttagacatgccggactggttatgaagcttaaaacgtatgagtgctggcttgatgaaaaaagtctggcgcttactcctacggaatttacgatactaaaggttcttttagagcataagggcagtgtagtccgctctgaggaattatttcatgaaatatggcaggaagagtattacagcaagagcaataatacaattacagtacacattcgtcatcttcgtgagaaaatgagggatactggtgaaagccccagatatataaaaacagtgtgggggattggatataaaattggagagatataagaaaatgaaatcggattatacaaagcttagccgtatcacgtttattagagggcttggaattacactgggtgcggtcgtatccgtctttttactgcgggcgctgaccaggggacatttggcagatacgattgtcagatggattgcgcaggggttttccatgagtgaaacccaggctgatatagtatatttcaaagtcgtaacggctaatatgcagtttatacttggtattgtaatcattctatttgtgtttttactgttccacatgctgctgcattcctataaaaggtactttgatgaagttttgttaggaatcgataagctcatggaagatgggggccgcatatccctgtcaccggaattggaaacggttgaatgtaaattgaattatgccaaacagacactgaaagcacgggccgatgaggcaaaaaaaatggagcagcaaaagaatgaccttgtggtatatctggcccatgatattaagacaccgctgacttccgtaattggatatctcagtcttttggatgaaaatcctgatatgtcagatgataagaaagcaaaatgtgttcacactgcatgggaaaaagcgaaccgccttaggatactggtgaacgaattttttgaaattacccgcagctattcagaatccacaacgctccataagacaaaaattgatctttattatatgctcatacaaatttcggaagaattgtatccgcagctgagtacctgcaaaaaacacatagaaaacaatgtggatgagaacatatctgtgtatggagattctgaaaagctggccagagtatttaataatattctgaaaaatgccatatcctacagtgaggacaacagcgcgatatcggtatctgcaaaagaattccctgaaaagacggtaatccgatttgaaaacaagggaaatattccaaatgataagcttaacctggtgtttgacaaattttatcgtctgaacagcgcaagacagagtgacaccggaggctctggccttggacttgccattgcaaaggacattattaccttgcatggcggccggatacaggctgaaagcaacaacggatatactgcctttatcattgaaatcccgtcagccgtatgtaaagacctcagcatggcgagttaaagatgaaaaaaatcgtatactataactaaaaaagtgcctgttcatccatggtattgcaaatgtacctgcgggagcaggcagcttttataaggagagttattattatgcacagactagtttcaatgagtatcgaagtggcagccgcatccgttgtactgatcccaattctgcttctgtaccaaaaattgatattccacaacgtaataaagacatttgtgtatatcatcgtcacactctatttgaccgccatgtgttcgttggtcggctttccatatataacggggctgcatgttgtgttttcttataattttattcccctggctggcatgatgtctggcctttcggccagtttcctgaacattttgctttttatcccattgggaatactggttccatgcatatggagtaaatatagaatgatgaagaagatggtacttttaggttttcttacttcgctgagtattgaagtcttacagatattcacctttcgggcaaccgatgtagatgatttaataacgaacgtaacaggtaccatcatcggctatttcatcagcagagtgattattaagaaatctcctcaattagataagcttggaagccgggaaggtgagctatatcttctatatggaacggttgctgcagtgatgttttttgttcagccactgatttacccgttcctgtggcgtttgatacaaggggcctgacgttaggccctgcaatcacatttgtaatgtcgatgccttagggtttccttaggaattcatttaccaattcttagaaaaacgcttatatgaaattaaaacactgcctgttctttcatggtattctgaatatgcctaaaagaacaggcaatttttatgaagggagaattcaaagatggatccatatgactaatcattgtgctgtgtacaaaaatacagattgcacgttaaaacaggaggtgaaaattgaaaatgaagatgatacggcaggtcctcacagtcctgggtctgacaggaatgctttttagtatgacggcctgtggaaaacaaaccaaaaccgaagcgcccgaagcatcctacatcgcgagcttttttgatataccggatacggtggcgtatatctcaaggctcctgataaaggataatacagcttatatgtgctgctttgaagaaagtggtatctcctatctggcgtccatgaccgttggtgatggtgaatttcaaaaactgccattagaagtggaggcatccacttccctgttagattttgcatttgattccaagggcagcacatgggcggtttgcatggatgataccgaccgttatagtcttaagaaatttgaccgggacgggcaggtaatccaaaacattgatttgaacgaggtattggaaaccacaaacgctgccggggccggcagggatttgttcctgagcatcgatgcggagggatatatctgtgttgcggaaaaaagaggaaatacatccgcatatatatttgatgataaagggcagtttttattcccccttacgtatgagggaaatcttctgaacacaataacaacggctgaagggcagattggagtctgcgcatcatcagcgaaccggatggattatgatctgctcacggtggatatgaaaagtcgggactggaataaggataggatttacctgaaagcaaccgcaggtctgtatggagggagcagcaatagcttctaccggtttgattcctccagcctgtatagctacgctgcaggctcacaggaaggcaggcatgttttcaactggtcggacgtgggacttagcgcatcggatgttcacttgggtgaactttcagatggaagattgattgtggcagctgcttcgcccaatcagactacggcatttacgtatgagatggcagtactttctcagggagtggatgagcgaaccgtcctgagtatggtgagtttgaccgcaggaccaggggtcgttcaggcagtttctgactttaacaaaacaaacagccaatacaggattgaacggacggagtattttccatttgagcaaaacgtgtccgatgaggaatgggacagtgcggttgtcaatctgaatacacggattatttctggtgatattccggatattctggatatgagtaatctttcggtccagatttaccatagtaaagggctgttggaagacctttatccgtatatagagaaggacccaatgctccatatggaggactattttgaaaatgtttttaaggccataagccttgatgggaaattaccttatattacagacggggtagcagtatcaaccatgctggctgatgcagacatcatgaagggaagaaccgggtggacactgcaggatttggagaatgtcctgaacgcttccggatctaattccataagcaatatgtcgggggcatcttttcttaaagtcatgcttcagacggataacagctttgttgactgggcctcgggcaagtgttcctttgattcacctgaattcataaaattactggaatttgccggacggatacaggataacagtaaaaacggctttggaggagaaaatctaagcggtacttatgtagcagcatatgaaaccatcctcagtatttaccagattacccagtatagggactattatcacgggaacctggaactgctgggccttccaagcagcagcggtgagtatcatgccctcaaacccgaagtaaaaatcggaatatcttcggccagcgggcagaaagacggcgcctgggagtttgtcaggacattattgacagaagagcatcagaagtcctgcagcatgctgccggtccatcaaggcgcctttgatacagtcatgcaggcagcgattgacggaaaatcaatctggacatggctttatgaaaatggaaaggcaacaacggaggatgctcaagtgacaaggcagcttctaagcaatgccgcctatgtggtaaatgacaatcagacgctggaacaaatcatactggaagaagcccgtgagtacttttctggggcaaggaatgcaaaggaagcggctgaacgaatccagagccgtgccagcctttatatcaatgagcaaatgtaacatgaaatagggatagagaggagttagaacgatgaagaaatatgttgtaaaaagaaaaacggccgggctgtgtgcagtaatctgtgccggtatgcttttatctgccgggtgtgctggctcagatgccaatacgcaggcaaaaaccgggacaacagaagtgtccagcaacctggagaatgaatctgtcacgtatctcagtatagaggccgatcaggaggaagttacgaaggaaacggagatggtgagtccagatgctgccgccgaaggaactgatgcggaccaaggagaaaaagaggcggaaacgctggacacattcacagacgcgagtgacatgatagaatctgccgatgtaagcgggacagccggtgggtgctcggatgcaggctttatgatgaatacctcccccttcgcagacggcagttcatcttccggggatggaggcagtataaagattgtttatgcagacggggccgtatttcaaaaggggcttgtgaaatcagacggaagcagttattctctgaaagacagtgaaaagagtgggctgaaggataaagactttgtattatgtttcggaaaccagcaggaagacggtacttttttggcagacagaatcattgtgattgaattcaactaacctgtaggagacgatacagctatgcgcttacatattgtagaaaaaatgaatatggttttaaaacagcaaaaaagcatgcttgcttctggagagaaatacaggcctctcatagaaaatcgtgtgcagcgcatagctgtacattctattgttgcgttttttacactgatatttgtatgcacaatcatatcccgtgtttcccattcctttacaactgccagcatccatgtagcgaccctgacaagcggggccttaacggaccgggctgaagcagaaggaacgattcaagcagcatctgacaggggcattacgctgccggaggggcttaaggtcgtggcggttaagacaggaaaaggcagtcaggtaaacgcgggtgatgcactgcttgaatttgacgtttcttccattgaagaacaggctaagaaactggaagatgaaatccgtatcctgcaattgaaaatagagctttccggaagtgagggcggcaatgatgtaatcacggcacaacgtaatcttgaggatgccaggcaggcgtatcatcgcttatctgaaaaatatgcccggcaaaacacaagattacaggaagattattcaaagctggaagagaagctcgcggctgccgagaccagagatgaaaaggctgtcgctgcaaccaggcaggaccttattgataaagcagaggcggtggttaaggaagcaaaagaaaatctggaggatatcaaagatgcggcagaggaggctatctatgatgccagaagagagcgtgatgatgcctcagaccatctggatgcctcaagggaggcgtatcaggagttgttggaggcttataatcaggcggaacgtaatcttaacgatgcgaatcaggcggtgaacgatatcaaggaggcgattgcaaagcaggagcctggagacacctctgattataccgaggagctaaatgcagcaaaagaggaactttccaatgcaaaggaggaattgaaacaggccaaaaaggaattgtcaggagcagactataaaacttcgtcctatgacagtgctgcagataatctggatgccattgaggagcgctgggataacaggatagaaagggccagagataccctcagggatgcaagagcagcgctgacaaaggcaaagaagcgtaccgacttttctgacgaagccgcggtcatagaagcccaggcagcggttgaggctgtaaaggataccttgacagaggtcaggcgtgaatcagaagacaattggtatcagagagaagaggaactttatgaggcacaaagggcgattgaagcagcgcagatagcattggaaaatgcacagaagcagacggatgcgtcacagaaagaagatgaaatcacaaggattacctgcgggtctgaattggctgagaaagaaaaagcatggcaattgctgcgggaaatgttggcccatgatgggcaattgctggctccggcgtccggaaccgtattaagtactgtgaaaagaggcgctaaaacagaagcagatgaggaggtagtcacgctttcctgtgatgacagaggatttgtttttgaaggagtcctggataaggaatctgcacagcactttatagccggagacaagggagaacttacgtttcaagcggatggaagtacgcagaagatagaggtggcgattaattctgtcagtacatcggatgaggaggataaggtttttgtatctgcagttttacccgaaggaagttattcagttggtctgcccgcacagctgtcattgagcaggaaaagcgagacgtatcaaagctgtctgcctattacagcacttagaacagattccagaggtgatcacgtgttggtgattcgcagacagaattctgtgatgggaacagagtgggtcactgcaaggattgatatcaatgtaaaggacagagacagtaaaatgatgagcgttgagagcgcgcttacttactccgaccaggtgataacaagttcaaataaggcgatagcggaaggagacagggttcgtattgaaaactgacaattatgttcattatatggtgccggtgatatgggcattgctggcagttttcttttggtgcatggcctgctcgttctacagttcggctataagcctatgctcaagcgtgggaatcaagtgggaaaacggcggcatcagccccatcgccctcgtcaggcagcagtcctatgcaaaacaggatggcgcaccggaacagccggaggccacattatggaaaatccatccggaccaggaagcgagggccgcggataagaaaagcatgattgcagatgcagttcttgtttttggggactgcagggatattacaacagcaatcatgatttatggctcctttccggcccaatctgaccagtccggatgtgcggtcagttcgggtttggcattctcgctatggggaagcaccgaagttttggggctgccgataaaaatagaaggaaacgtgttttacgtccgcggcgtatttaaggaggaggaaccgcggttattccgccaggtgcaagctgaatcgaaagaaccattatccaatatgcagcttaatttttccgggacaggaaccagcgaaagggccaggcaatatctttcagctgcagggttcccggagggaatgcttcttgaattgccgctgatagaatggggacttgacatttttttcaggctgcccgccatgattctgtcattggggattcttattcgtgccataaggcgtggatgcaggctttggcactaccccctgctgttggcgttctatctgccgcctgcccttgctgtgtcagccgcatccatcatttgtatggacctgccggaaatgccagccggattcattcccacaatgtggtctgactttgaattttggaaaaatctgtttgtgggacattggaagaatctggttgcctggattctggcagtatccaccttccgggatgtagagcttatggccgcctcgtttatgaccatattattttccctgggcgcctctgtctgtgcagcaaaagcagcaattctaatatcgatacgtacttatagaggtatggtcctgggctgtgcggcatatacactgacgcttagtttgctgtctcttcatatggcatggacccgcagtatgatgttctgcaaagcaatgtatgtgatgccctgtttgtggctctgtgcagattttatgtttaaccggcagagagagaagcttatctgtgttcctcacgaaaggagattttcggatgacaaaagtaaacagaagaaaacaatatgaggatgcggttcctttaaaagaacgcatggtgccatggctttttttgtcaccgagcctgttttttgtaagtattattgtactaatcccccttttggatgcattccgccgttccttttttatggctgccagtgaccggtttgtgggatttcaaaattacgcggcggttcttggcaatagtgcgtttaagctggccgcaggaaataccttgaaatttgccgctgtctgcattccattgttgttattcatatccctggcagtttccctgcttttgtcggcctacaaggaaacaagaggtattttcaaaacctcctaccttgtacctatggcaataccagtagcttccatcgtccttttgtggcgcgtgatctttcataaaaacggactgttcaatgcctttcttgcactttgggataaaacaccggttgattggattggaagcggggctgcctttggggtactggtctttgcttatctatggaaaaactttggatatgatatggtgctgtggttatctggactcagtgccatcaacccggcattatatgaggcggcccagattgatggggcaggcagcatccgcaggtttgtacggattacgttccccaatcttatgccgacgttatttacgattacagtgctttcactgctcaattcctttaaggtgttcagggaggcgtatttgatagcaggaagctatccaaatgacagtatctatatgctccagcatctgttcaacaactggtacgggaatctggacgtggataaaatgtgcgcaggagccgtaatgatggcactttttgtatttgtattgataatgctgctgcagaaaatcttaaaccgaggtgacaatgcatgaaaaaatggctgatagggtcaattcttgtttgtatcgcagcctttatatggcttcccctttggatgttattatccggtaccattatgggtagcgcagaattgtatgaaaatcttgttccggtcctggaaggaggcgaagggactgctgtgtggccggtcattgcgcagtatccgactttacaggcctatgtggagctgctcttagacacgcctcagttttttacggtattttggaattcctgcaggcaggttttacccatcatactcgggcatgttttgttaggcgctcccgcggcatgggcatttgcgaaatttcactttcgtggaaaaaagatactctataccttatacattgtccttatgctaatgccgtttcaggtgacgatggtttccagttatcttgtactaaacaaactgaggctgattgatactgtatgggcggtcatcctaccgggggcagcgtcaacctttcccatattcattatgacgcgtttctttatgacgataccagaggcgattatggaggcggcagccgtagatggtgcttcccccttccagacatttgtatggtttggaatccccctgggtgcggcgggaatcctctcagcggtagtgctggggtttctggagtactggaatgccatggaagcgccgcaggcatttttaaagaaccaggccctttggccgctgtcattatatatggccaatatcaccgttgacaatgcaggggtatcgctgattgcatcactcatcacactgatgcctcctctcctgatatttctgttcgggcagagatatctggaacagggcatcatatcttccggaatgaaggattaaaataaggaaggaacaggttatggaaaaagagagtctggcaggagaactgcagatacataacgtaaataaatggtatccgggcaaggtgcatgctgtcatagatatgaatatggaaataaatcagggtgaatttattgtttttgtcggcccatccggatgtgggaagacaacgctgctgcgtatgattgcagggcttgaaacgatcagcggcggtgaggtcattatggatgggagggtcgtaaacaaggtgccgccaaagaatagagatatcgcgatggtgtttcaaaactatgccctctatcccaatatgaaagtaaaagacaatattgcattccctcttaaaatgcgtcatactggaaaacaggaaaccaaaagcagggtggcagaggtagcgcgaaagctggagttagacacattacttgaaagaaaaccgggagctctttccggcggccagcgccagagagtggccctggcccgttccatggtgagaaagccgaagctttttctgatggatgagccattagcaaatctggacgccagactccgaacagaaatgcggagagaaatcataaccctgcagagggaactgggggttacaaccatctatgttacccatgaccagaccgaggcaatgacgatgggaacacgtattgctgttatcaatgaaggggttctgcagcagtttggaacgccgcaggaggtatacaggcatcctgcaaacctgttcgttgcgggctttataggctctcccaatatgaacttgtgggatacagagcctgttgcggaacaagggcattgttatctgactctgggtcatgccaggattcccatggataaaagaaacctgccgccggattacctaaagggcggaataaaggccggcattcgcccggaacacataatgcctgccgcttcaggggaacccggcgccatacagatgaaaatcaatattctggaaaataccggccgggagatggcagtttttcttacggctcccgggatgccggatctgacaatgataacaggagctgacttctccggccagcccggacagtcggtatcggtccgtttgctatctgaaaaaatccacctattccataaagaaaccgggcaggcattatgaagatggaagatgctatgcagtaaatccggttcggctagcttaatatagtgaaggtggcggctggcgatacctggagagagggcgttggggaagagtacatgggtttaagggaattgctcatggaagttttaaaagagggaatgaaacggcttttttaatgaagtaaattagccggaatggcgggggagccaaatatgatatccgcgattgggcgccggaccatgagaagatggggaagggaaccacgctgacaatggaggaagtggagcgcttggaggtcaacctttgcaaaggaagcttctggaagtgagtattttttgcttgatgatggctctgtattggaaaaattgcttatacaaggaattctatcaaaatatcgaaaagctacagaactttgcaaaagaaatttatgaatttcattcaagagaaaagtatgcctatcgatgaattgtattttgacgccgatgtcatgattatcagtctggtttctgatgatggcatattaggagatgagacaatgctaaaggaagcaccatttaaggatgaaatattcactttagacgaggtgatggaaataaaaaaatattacagaatcaaaaagatggttgttacactatgaaagatggcggggaaattaatgttttagagttgtggtaaatcaaagactcgccagtccctattggagaactgacgaggttgtaatcaataatgatttgtatttgcttcagcgatagctttagtttggtgaacagtaccccagggatgatgaggcggtgcataaatcgaatataattttaatggaatatcgccagtatttactatattgtgccagattccggcaggaacgaatatggcgctgtctacaaagactggttgttgaaaatttaaattgtccatttgcttacccatttggacaaccccgcgaccagattcaatatgcaaaaattgatcatcgtctggatgcacctctacgcctatttcctcaccagctggtatgctcatcagagtaagctgcaggttgtcacctgtccataaggcagtgcgaaatgtgtcattattcatagcagcattgctaatattaatagtgaacggatttgggccgtaatcagttgccacatttgattggaatcttgggtaggaagctcctgagaaataggaaggcgagttagtatattgattgttaagcactttagtctccaaggcattctttataatattatatgaaaaaagttgattaatgacaacattgtttaatgataagtatcgttctacaacaaaacgtagcaagccttgtgaaaaatagctgttttgtgtaaacgcatggtttagagtatttcatggaacagcagagagaaaaatatgaaaaaatgaaatagtatcccccagtttgtaagtctgaaaagtttgtgcggaggaatcaacagatatgaaaagatacatcgcttttttgcgtggtgttaatataagcggaaaaaataaagtaccgatggctgaattaaagagatgctttgaagaacttgattttagtgaagttaagacatatctgaacagtgggaatgtggctttttcaagcgatgaggataacatagaggtgcttacaagccaggctgaaatgataataaacaggcaatttggtttggatattcctgttttcgtcatttcaaaagaaaaacttgaggatattttacagaatgctcctgagtggtggggcgatgagaataaagagatttatgataatctgatttttattatgcctccagccacattttctgaagtatggggagaaattggggaaccgaaggaagaattagagaagatcaaagaatatagagaaacggtattctggtctttcagccgaaaagattatcaaaagacaaactggtggtcaaagactgcaagcgcgaacatcagcagtaagctgacgattagaaccgcaaacactgttaggaaaatagttgggatgtaatcgtagcccaaatttcagtttgtgggacaaataagcaatggaacgaaagcgagtgaagatatgcgcgttaatcaaaaatggagtatccagcctaaaaataatattgcagggatgggcgatgtaatactgcccaccatagatgcgattggtaagtctgttttttatgtttcggatggtcacggttcttactattccagtatgcgtttaagaaaattacctattgagacaggagaagaactggcgagtgttctgacaagagatgctgccagatgtatttattttgaaaaggaatacatatatgcttttttgaacaagcgtgtattaaaattggatagaaacaatgtatgtgattgaaattgagcaaaccgagggagttatgagtgataaattcacaaaaagatactatgaacttgagcatataacagaaatactattgggattcaactgttccacagccataggtgtatatcctgaaagtgctgcatgcagattagtatgcttcaaaccctcaagcctatttatccccattgccttttaaatcaaaatgccatttctgatggaacggcagtttatcctgcagcatttaaagatattattgatttcttcttaaatgctgatattagtattgtccaaatgccctgtccagagttttgctgtttgggattggataggggaaatattcatggtgctgatagtccagtcgtggcagagaatacaagaatacgttcagcaatgaaaaatgatagcacgaatatgaagctatcgaggctggctgattatgtagtacaacaaatcatagaatataaaaaatatggatttgaaatcatcgggattatcggggcaaaccgttctcccaattgtggcgtagaaacaacctcagacaataatgcagaaatcaatggaatgggactctttgtagaaaaaatagttaatcaacttttgcaggaaaatatgtcggttccaatgataggtataaaaggaactgataatatacaggaaaaacttcatcagttggtgaatcgggaattgtagataaagagcgggcgatgctgttcatcgggcgctttgctgtacttccttacctgggagattgcttttccggtgagggaggaaattagtctggaaaaaaactcttggaattgtggcagaatcaaggaaatgaggcggcaacgctaaagcaaaatattttagcgccaaggagggaaggtttttaatgagtagttcatgggaatcatgaggctctatatatggcaggttacgatagttttcggatttaaatcatcggcaaggtgcttcttgcgtacaatagtgagaaaagggcataatgataatgcatcttacaaatgttcaattataaatgaattcgtaaaataggaattacaaactttacaagaacagggagatgtgatattgttggtttataaaaactatgcggaggtgtaacagatgattgaacgaaatgaatatctcgaaaatttaattagttttaaagataaaaacctaataaaagtaataaccggaattcgccgctgtggtaagtcaacgatgtttgaattgtatcagtcctatttaaaagagaatggagtagaagaggaacaaatcataaccgttaatttggaggacggggattatcgcggtattcgcacatcagagaagctatatcaatatgtggaaagtaaactggtaaagagtaataaaaactatgtatttttagatgaagtgcagcaagttgaaaatttccaggaagcagtagactggctttatgtaaagaaaaatgtggatttatatattacggggtctaatgcgtttctgctttccggagaacttgccacattgctctcaggcaggtatgttgagataaaaatgcttcccctttcttttaaggaatatatatcagcataccctggaaacacaaatacgggtgcactgtatatgaattatttacaaaacagttcttttccaggaactcttgaacttgcaagaaaacaggatatcagagtttatcttgagggaatttacaatacaatcttactcaaagatatcgttaccagaaagaaaatatctgatccatttatgcttcaaagcgtggtggagtttatgtttgataacattggaaatatgtgttcctctactaagattgcaaatgcaatgacatcatcagggaggaaaatcagtgtacctactgtggaaaactatctttctgctctttgtgacagttttattctatataaggtaggaagatatgatataaaagggaagcagtatctcgctacaggagcgaaatactatgcggcggatatagggcttcgttattttatattaggcacaaagcaggcagacatggggcacatcttagagaacattgtttacttggaacttataagacgaggttatgaagtccatataggaaaagttggagatgctgaggttgattttattgccataggcgccgaaggggaagaatattatcaagtatctcagaccgtattggaagagcagacactaaagcgggaactttcatcactggatgcaataaaagaccataatccgaagtatcttcttactatggattatacgccactgacatcctataatggtatcaagcaggttaatgttttggaatggcttctaaagaaatagtcagaaatatctgttactaatgagacacaggagtttgcgccgaaaggaagtttcatataccccctgtctgctgattgctaatgggagctgctttggaaacaccggacaacaaaacaggcggcatgcgccccttttcgggagcataccgccgtctgttatcagcagcccgtttcccggtctgcgtgtagttccttgtaaactggggattgagaaaattctcaacaggcggagcgcatattcctttctagtgcttgcagctaacaactaatatttttctggaactcgaatattagctacgttatgaaacttatatttttctaccatgttttttttcatacaaatcaaaatataacggtagcaatcagccataccatccgcaaaggaacttgcatttccctcatataattgccgaagtgcggtaatggcttttttgttcagatgagagagagtatgcctcttggacggatagtaagcaaaatgatgtccccattcaagaaggtgattggtttcggacagtataacatataaaggttctaacgtggtatgtttcaatatggcttctagaatatctgctaaatgaacagaacctggtgaagtaaatctgtctgctaactcgtccaattcttctctggtaaaccgcgctgccgcagctaacgccgccggacgaataatgaatatcattagctgcaaggcatgaagataacgtaatgctttttctacatatccggaattaagagccagctgatgaagtttcgtatcatccggttctatgactatagtgcctttaccatttaatttttttacgaatccccgctgttcgagttctgacaatgcctttctgactgtcgataaagagacatcgtactggttagccagttgcttttcatatggaagatatattccaacagaatattctccaaggccgattttcagattcatgtcatcaacaatttttgagtaataataatcctggccgcgcatgggattccacgaaaacttcaaaccagtttgtgcaggacatttgggcgttgtctctgatagataatttaacgtatgttcaatggaatccgtaagtttctgatacatatcagataactggttgtactttgtgagtggatcatcgccctttaatgtatctataataacactggttacagacacagccccacgcaaaaagtgcttagagaaatagggacagtcttctgcaaagaatgcaagcttattataaaggccaaatgtagaatagagttcgctgaataaggaattcccacctatccttagtatatcatatcctaatttagaaggaggagaccattcacctgaggcatctcctaaacgcaatgctttcatagcctgtttatagtggggcattatctccacatcacactcctgcaaggcaaaaaccataagtgaaggcagtatgagggcaaaggtctgatatagctgtaaaatgccttctctttgttttaaaatctcgaaaacagtatttgatgaattacaagtatctttttttgaagcaacaattggtgcaagacgaggctgaatatcaaccagcccttctgtcctcaatgcgtcaaagacacggttaatcgtatatctgcttacatgaaattgctcgcaatacatccttgaagatggcagggtatttccaggaggtatttggccttccaaaatacactgcttaatttcattatatacaaatgtaaattttgtttcttgtggtttcacaacccgcctcctctctgtctgaattatatcatgtcaaaccaatgctgtcagtataaaaagttatcaatctatttgtacaccttaccaatatggatgttgccagaatgttaatataacatttataataaaacagtaaaattatttggaaagagtttaagaaccatggaaaaacaaaaaatcttaattgcagacgattcagaaatgaatcgcgcgcttttgatagatatcctggaagagcaatatgatgtggcagaggctgaaaatggtgtagaagcaatttctcttctttcaaggcatagaattaccaaaatcctggtggtagacgatgaagaagtgatctgccagaatattcagatagcgatggaagaaaccgaagtttcggtggagtacgtgctgagcgggcaggctgcgttggatgtgttgaagtctggcgaaccagaaagtcagccctatcatgtggtgctcctggattggaagatgcccggacttgacggaatagaaactgcgaggcgcatccgtcaggaaatttcagaggatatcccgattctgattctgaccagctatgactgggaggaaattgaagaggaggccacaaatgtggggattgatgcgtttttgcaaaagcctttcttccgtagcagtttccgtcagaaggtggatttcgtactaaacaatacgctaaggcatggggaggctgctgaagaagaggagagcgttctgcaggggatgcatatatccttgtggcagaggacaatgagatcaatgcggagatactcggcgagctgttggatatggtgggcgctacctgcgacatctgtgagaatggagagcttgcgatggatgcgtttgaaaagtccacacctgggcagtatcagatgatactgatggatgtgcagatgccggtgatgaacggttatgaggcgacgagggctatacgaaaactgaaccatctaatggcgcagagcatccctatcatcgctatgacggccaacgcctttgcggaggatatcagggctgcgctggatgccggcatgaatgctcatgctgccaaacctgttgatatggcggttttagagcagactgttagaaccgtgttggggaaagtttaaggtagttaagagtcccactgaaacgtagatttgctgattgtaaaacatactcattacttttcttgtatttggtatgttttgtgctgatctgacttgcagagtgaaattttacaacgaagaaattcacaaaaaataggatgatagcaggacaaatcaggaaagaaaacggaattctccctggtacaatttacacagcaaaagcggatgagatctgccgcatagtcgggtaaattgtaagggaggaggggctgtgtatatatagaagatagaaaatctccttacagcgttgtccgtggttcggtataagtcttacaattgaatattgtttggcggcctgttcaaaagcgtaaacaacaaatacaccgatgcctggttttatattgggtatcggtgcttttactttattgctgttcaggatggaaggcgagccatttagcttcataagtatctaaataaaaccggtttccatactcattttgaacgtaatgttttttacctgataccaaccgcgtagttcagtccgcaaatctgagtctggagaaatgggttccagccatatctgagtaaattgctggatctcagataagataagataagataagataagataagaggctttccggatggcagactcggttcggaaaacaactgcggcagcgtaaacagcttttgggcatcagagaacggaatggtttgcccgtttgagagcatcagagtatgattgatggtgttgaccagcatccaaccatgattcgcggaccaaaccgtcaattactttcaaattattaatttgccttgctttcttaaaatatctcggcatttgcccaccacctttatcttaacaatcatctgttattcaagagtccagaatcttcttgctgcgaacggttcctcctccagcttcttgatacctgaaaatactgttgaatatcagtccactatgtacatattattgtagatatcgagaatcgaatctttggaacgggaaataccgatatctgttagtctaatatcagtttcacgtatctgtgcaataaagttttggatgtcctccccaacggaggatggtactgaaatcctcaggtcttcccgaattaacggaaaaaggcgaaatacatccagacgatgtttccgaatgtcacgggaattcacatggaatccctgcgcctttttgctcttgagatcgagccaagctttcattttcaagggaatgatgtgctcggcatctaagatggatatcccatccgtgacggttcggccatctaaaagaaaatgatagtagtcgtcattaagaagaattgcggacagactggatacctcatcatcaatatgcaggggtatgagatgggtatcagcctgaagctccacatgattctgcggtctggaaaaaagctctatcatcttagggtaagagggattggccgggtcaatgaagcgatagaattcaggttgtcctgtgcttctctgtctggtatgatagcctccggcttcgatgaaatcccaaaatgcttttgcaaattctgttgtcagtgcctccacgataattaccatgtcgatatcaacggtctgacgaaagtcaagtccggcatctgacataagcagatcgcaggcaaatcccccaataaccgtatactggtctttataattgtcgaaatgttctctgaaaatatctattccgtttaccatgtgtatttctccttattattcctcatgcttgattggaagttcgtgtttttctcttatatcgtccagacccatttgaatccgttcatttggattatcttccaaacttaacagcaatgagatatcatcaacccgaccgttatgtgccaacaaaatcggatcatagcgccatacttcaagaatgtgccctccaaaatcccggaaatcctgctcagagataatttctgcaggcgggatttgtgtgccggctttttttgagatggcagttgccccatcctgttcgtttgccccaaccattgaaatatccgccaaagcaaggataccgcttttgggcaatgctgaatcatggaagggggttctgacatatataagtcgttctaccggtgattttaagcggggataacctttctttaaaaattcgggttttttaaaggatggagaaatccatttgtttgttccctcggtcctgtgagtaataaggccggatacggtaagatcattaattgctctggtgcaggtagctttggagagcagaagatctctggatatttgcgtcaaattgacggtatcagtagtctgcaaataatacagatacaggaacacgagctgggttccgggcgccattttgtcaggaacagttgtttccgctttaaatttttcccaaaaggaacagccccagaatgggagataaacctgttgggatggtgaaataaatggtatattgctttcaatcaggttacgccgctgcttggatgttatgttttcaagacacagcgcacagggaaattcgcatatctcctgaaatttaattaactgcttttttaatgttggaagtctccaggaagaatcaataggagacagcagtacacactggcttttattccaggacaggctttgaatcttatatccgtcacgaatataaaaaggcgttttggccggacaatcaaattctgaaactttaatattgtccccaaatatcgtttttaaaaaatcaaacatatttttccccctttcaagactctgcgaacttgtttcatcgaaaagacattataccatatacaatgaaacttgtcaaaaatgaatgaaacaatatggagcttttaagagtctttggcttgaaaaactcgacttatatattatgtgttaggcgagcagggattatcagccaaacagttttttgtttttaaatacagaatgacctcaatataatacaaattatattgaactcgcaggacgaattaatggcaaagcctgctctcagttaaacacaattataaagatatcctgcctaaatgagttaaatataatcaaatcggttgtagattgccttgatggattgtgtaataacaatgaggaggcgaatcaaatgatcgaagaatttactgctcatctgcaaagcttgggaaagtctgaaaacacaatccggacgtacagtcatgatgtaacgatgtatctgcattggtgccgggacagttttggagaagagccacagcttttataccgtgccaatattttggattacatttcctatatgcgaaatattcggggttatcatccgcgtaccgtaaataaccacctttcttccctgaagagcctaaatgagtatctgattatgagtgggcggcagacggaagctgctgtgctggacagcgattttatgaaaatccagatacagtatgccagtccctgcactgtggagaaaaaagatgtagaggcattccgccaacgtcttctggagagtggcagtaaacgggacttttgcctggtcacactttatgcctattccggtatgcgacggagtgaatgcgtcaatctgaagctggataaggttgatctgacagcaaaggagatccggattgtcggtaagggagacaagcaccgcctggtctatatcaatgacaaaattgtttacgcgattcgggagtacctaaaggtgcgtgattcggaaagcccatatctgttcgtcagccgccagagtgagaagctgaatccttcccgtatcaatcagatatttaaccgatgctcggatgttattacaccgaagacgctgcggcattatttttgttccaatgctctggagaacggatattccattcacgaagtcgccaatcaggcagggcacagcaagtgcatattaaggccggaagagtaaccgatttagaggaaaacagaataattgattgaatcagggaaatgctattacgaaaaaaggtgcatttccctgtttattcgtaatggagattatccgctcctattgacacacttactaaaactggatataatatattacgaaaaaaggtgcaaacgcacttgctctcgtaatggaggattgctatggaaattaaacgtgattcatatttgaacaaattgattcgcaagaagaataacggcttaattaagattgttaccggtgtccgaaggtgcggaaaatcgtatctgctgtttaacctattccacaatcacttgctggaagaaggtgtagatgaggagcacatcatagaggtggctctggatgaccgcagcaacaaggaactgcgtaatccggacaatatgcttaaattcgtaaaggaacgaattgtcgataaggagacttactacattattcttgatgaggttcagcttttggatgaatttgaagacgtcctcaacagtttccttcatatcaggaatgcagatatttatgttaccggcagcaattccaaattcctttcctccgatttaattaccgaattcagggggaggggcgatgagatccggatttacaccctcagctttcgggagttcgtttcagtttatgatggttccctggatgaagcatgggatgagtattttaactacggcggcctgccgctgattctttccatggagacggtggaagataaaattgaatatctcacttcgctattccagaaagtgtatctttccgacattgttgagaggaataaagttagaaataaggatgaattggacgagctggtggatattctggcatcggcaatcggcagtctgacgaaccccagtaaattggcaaagaccttcaaaagtgtaaaaggcaaggcaatcagcgataaaaccctgaaaaattacattgattatttgatagatgcctttatgatcagtaaagcggagaggtttgatatcaaagggaaacgctatataggatctcctgccaaatattattttgaggatatcggacttcgtaatgcacgtttaaacttcaggcaggttgaaatcacgcatattatggagaatatcatctataatgagctgcggatccggggatataaggtagatgtcggtcttgtggagcattatagcaccggcaaggatggaaagagacaaaaaaagcagttggaagttgattttgtagcaactaagggcagtgaaaagtattacatccagtctgcttttgatatgaataatgaggaaaagattgcccaggaacagcgctccttagtcaatatttcggattcgttcaaaaaaatcattatcgtggcagataacatcaaagtcagaaggaatgaagaaggtattactaccattggccttcgcaattttctgcttgacgaaaacagtttaaatatatgatatagacagtgaggtaacacatatgagaagaacattagtagcatatttctccgcaagcggaattacagcaaaggttgcagggaatttggcggaatcaattggggcagacattttcggtattgagccagagattccttataccaaagaagatcttaactggaaaaaatgattactcccgcagcagtgttgagatgaaagacccgtattctcgtccggcgattaaatataaaagggataatatggatgcctacaaaacagtctttgtgggctttcctatatggtggtattttgcaccgacgattgttaatacattccttgagagttatgatttttctggaaaaatagttattctctttgcgacttccggtggcagcggtatgggtgaaatttatgagagaattttaccgagctgcaagggtgcaaaactgattgagggaaaggttttcagtagtaatacaagcaaatctgagctttctgcctgggtggctgggctgaatatttaaagtattgccctgtctgtggaaataagataaggttacatatacggtcagatacagaatcgcaatcgggctttatggaggagatggaggaatataaaatggttttgatgatagatacgacgaaagagcaagtaggaaagcaaattgcagaaggattgcttcgtagtggtgggaattcagccgaaatggagttgattgacaccactgggatgaatatttatcactgcgtcggttgtaattactgttggctgaaaacgccagggatatgcgccatcaaggacgattatgcaccgattaaaaaaaagatgagtaaagccagtcaggtctggttgatctcagatacgcactttgggtttatctcctatcggaccaaaaacattgcagacagggtgatgtcccttgtcaccatgtatctgaaaatcaaggacgggcagatgcgtcatgtaatgcgctatgaccatcagccggatattggaattatctataccggagatggcgatcaggcttatctggaacagtggtgcaagcgcacagcacttaatctcgaaagtaattctctgggagcttttcctgcagaacacagaaaggaggcggttttatgtatgttgtaatcatcaatggaagtcctcgagtgcaaaagtatagcaacacggagaaaattattgcttcctttacaagagggtttaaagaaaatccaatcgccaatcatgggaaacaattcaggaggcatacagaaagaatagggaaattctgattgcgcttccgttatatgtggaatgtgtacctggtcttcttttggaatttctggaaaccctgccgaaaaaggatgaacatacaagactttcttttcttttgctgagtggttttgctgaaggatgccagcttcgttgcggcgaggaatttctggcgaagctgccggaatatctgggggttcgttatggcggctgtttggtcaaaggagacaatttcggaatccggatgctggatgatgaaaagcagaagcatgtcacaaaaccgtatcaggcgatgggcgaattgtttgcgaagggagacgggtttttccgtgaggaagcaaagaaatttactgacccggaatatttttccctgcccgtgcgctggatgatgcagttcgtatagatacgagttccagtcacagaggatgagaaatttcccatttgtcgggagattgcaaataaggaaaaattgggatttcataaggtgaggagaacatataaaaatggtgcatataaggaaagcaaaagaaacagaccgtaataacgtagccttatgtattgcagaagtgttggcaatttctgattgtaccggcagagcggcgagagtagaaaaagcatctctaaaaagacattttgggtttttgaaaggaatgttcggtgcttttgttttgaaagaagaatttgaagggcagcttgagtatcctatcacaacaggatacatagaatttgtaacagtgcgaaaaaaataccgtaaacaaggcattgctacaactatgcttcaagaaagtatgctgcttacaaattatcaagattttgtgcttgatgttactgatataaataataatgccatcaagtgttatacgaatattgggtttgatgaatttaagcgtattccagaaaaacacggtaagcaaaaaggctttaatgagaagatttttatgcggtatcgccgcaaatgaaagcaattaacaaattctttaggttagaatcgatgatgggggaaacgaaaaagcagcttttgcattccagtgaactgccccttcgtttacaccattttcgatttgacctaattgaacaaagtgagcgtccgggtagatactacctatggactttcaatcttttgctcttacccatggttatacaggatttcctgcgcagaagctacagaaatcaagtgtttccagataaataggtacgacaacaaaaccttaaactttgaggcttcaaaaaaagtatgaaagaataaacgtttaacatctttgtggtattcgaagctgtggttttccaagatgacctccaaaggctttacatacacagacatttatcccataaagctgttttagtatttcaggcatctccttatcctgaagttttgagagatacttttggcagccaagaagattcctacataaaataagctttttgcgtttgatgcgggaacaaagaagtccgtaatgccgaatcctgacaaagcgttttggtggcacatgcatcagaaaccgtcgtatgaattcgacaccggaaagaatcagctctttccattgtcctttgttccggtaatcttttatagaaaaagtgacggtttcatcatccatgcagataatgcggtgattgctgatggcaatccgatgggtatattttccaaggtaatcaatcacagactgtgcaccgttaaaagttttcttacaataaggaatccattctgcacaataacaggaatcaagcagttctttgaacgcataatggttacggtatttttcagcagttccatgaaacttaagctgattcgcattccagagatttttcagttcttccatatattttccacggaataccttggaaacagctcgtatgggaagaaaaaactcagtaccgttgtctttccatttatttttggatgtcagaccaccaccgaggagtattgtatggatatgaggatgaaagttcatttcagaaccccatgtatgtaagatacagatatatccaacagtggctccaagatgctttggatcaaccgccaattcactgattgtggcagaagcagcacgatacagagtgtcatataatcgtttctgattactgtaaatgattgggtttaaaatgtccggcactgtaaataccatgtggaagtaaggggcatcaagtaaacgctggaagatatcctgtacggtcggtttattcataatcagcacctgctttccagtcaaacggactttggattcccatcagggacttattactgatatgaagatgaatgacttcagaaacacgcattccggaagaatacatcgctgcaaacatcgctttatatttgatatcatcgacagcttctaacagacggtcgatttcaggggcagtcagtaccgttggaagcttgtgttccagaatcatacgtggaaccgtgatatcatcccaagggatattcaggacattccgatagaaaaagcggatggcagaattataaagattcagagttgtggctttcagcccttcctcttttttcgcaaacagaaaattcctgacatcctggcaggtaagttcttccggatttttaccttgatatttcagaaagtaagaaactgttctaaatatttttcgtacataataaaatcctccatgtaaaatcagtaataatcaaaacactgctttacacggaggtgcatttgggtcataaaaccgcttgccaaccaagcggaagggtggtattcttttcataggcagtggaaaggtcgatcctgtttgattgttttgttgtggtgacttaacaaaactacttttaggacttgctttccaccgctttttgttataggaaacagaaaatcgctatgccacagccttggcaggccatcgcacagcgattttgttcaattccagtatgtaagtgccggcagcattttcccggtccattataaaacagcataatcacgttatacaatgaatcgatatagtattctattttagatggcacctttaatatagtcaaataatgcaaaattaaaaggataagtattattttaattggtagaatgaggagatgcaggatgaaagatataattaactttcttgaggcgaacgtaaatggaaaaacgctgtatacaaaggaactaatttacaaactggaggatggtgcgttgcagggcgtatattctgaccagatatccttttctaatcttaaatattcccaaagcggattccagctggatatgttcattgtatctaacgaaaaaatatggcttatgggaccgagtggacaacgggaaaaattgcgaaaggattttagcgctgtttcattatttcgctttgaactggcacaacgtaaaagcaccaatgctgttacaggctgttttcggttcatatctgcttctgggaaacaggtagcggcagaagctattataagtggtatctatgatatacgcattgaagatgatgtgttaaaattctatgaaaatcaagcattgtatcgcgatcagcccatacaaggtgagagcttcaaacctgtagcatttcaggcagaacatcgtttttatagtaaagatggaaaactacactatgaatatgatggaaaatgttttgacgtggatacaaaaacaatgcagcgcttcaatagtcccgatatctttccgccatttatttcagtagaaaagtaaacgcgggtatgcaggccggttatgtgtcggaggcattttcggccacggtattgggaggctcccagaggattatttgccacgattctgacagttttttgttctgtgcaaattccgataaactgactatttataagccgcttctgaatggcgaaccgcgatttggatttccgccgctcagtacgcttttcaatcatgcccgagagaacatcagacgatatgcccaagacggctattcgagcaatgcggagctgtttgcggtttcccaaaagcacttgttccaaattctggatttatttaaaaaatacaatgcggattttgacacatttcttgaccgcaaatggggcgatggaacggtgcgatcggagtttgtggaggattttgttcccaaagaggataaggtttccatgcatgccgtgggaaaacacaggaaatcatttctcgtggtaacgaggataacaataaggaaattcgcaaggtgtttcaagaatattttaaaagctggtgaatagccggctgagtgggttgcatcgaacgtgaaagaacagcccagtttgtaaggttgattaattagaaggtgcggaggaatattatgttcaacgatggaagaagcaaaaaggttatttttattgcacattgccttttaaatcaaaatgccatttctgatggaacggcagtttatcctgcagcatttaaagatgttattgatttcttcttaaatgctgatattagtattgtccaaatgccctgtccagagttttgctgtttgggactggataggggcaatattcatggtgctgatagcccagtcgtggcagagaatacaagaatacgttcagcaatgaaaaatgatagcacgaatatgaagctatcgaggctggctgattatgtagtacaacaaatcatagaatataaaaaatatggatttgaaatcatcgggattatcggggcaaaccgttctcccaattgtggcgtagaaacaacctcagacaataatgcagaaatcaatggaatgggactctttgtagaaaaaatagttaatcaacttttgcaggaaaatatgtcggttccaatgataggtataaaaggaactgataatatacaggaaaaacttcatcagttggtgaatcgggaattgtagataaagagcgggcgatgctgtccatcgggcgctgtgctgtacttccttacctgggatattgcttttccggtgaggggggtagtggggctcaatggttcgatgaacaaggtaatcctatttggccgcctaatagaggatttgatggagaacctgtaacaacaactttacaaccggggactagaattgatcgatatggttatgacggaggaacatttgtttccccagaaggaactccatattcacagcgagcattggcacccgggacagaaagcaagccttatacagtgtttgaggtggctaaaccagttgaagtacaagggggaaagattgctccatggtatggagaagaaggaggtggaattcaatatgaatttagtgagtccatttctgaattactagaacaaggaatattaaagaaagtaggataataaatgaacagagaagaattatctaaagaacttataaaaaagagaattcctcatgatgcatattcattgtttggtggtttgccaaatgagagtttttgtatagcagaggaaaaacaatgggaagtatactatagtgagaaggggcaaaagacgcagttacggcaatttgattctgaggaagaagcatgtgaatatatgtatgcaaaattagtcaatacctttcattagcttggtgtattgattttcgcccggctttgctgggcgatgtcctctgggctgggtggcatcaagctacccatgaataacgatttttatcttttttcgccccattgaaagcgatggccgtggccgtatggcgtaaattggcatgttctttttctgcttgtaaaaataggactgaaaaagcaatactttgtcgtaaaatggtttacttaggaacactgaatatgttaaaatagtcttgtgtaacagcaaggaagagagaaaaagggatgcaaagttgtgaaccctctagtaaatgaaggagggtgatgcctatgagcgtcatagaagtattgacattattgcttgtgatatttgcggcattgtcatacatagacaataaacacaacaaaaaatagcatcctccaaaccgcctgaagttttaggatgctattttgcacttaatactgagggcatcagattttgtatctgatactctttctaacttgattatacacaaggcacttgaaattttcaagtgccttttaaaattttacagagaatgattgatttgtcgaatataaaaatactttctcgtcttattgacggaagaaaaactggaataactttagaacaaaccgatactgttattaatcgagcatcgggaaagtatggtggaactttgccgggaaaagttgagatttggacaaatgaaggaataataaggagatgatataatggcaagaatgacttgtacttgtggggcaaaattagataatcatgaagctccaaatgatgtagaactgagggtttataccgataaggaatgggaagatatttttgatggtgaaagtatacaaccttggatgattcctttacctaagtataatgtttggagatgtccagtatgcaagagaatttatgtatacgaaaaaggtaatgattcgcctattatggtctattgtttagaaaaagagtgatatacatcgcccggctttgccgggcgatgtccctgcctgggtggcgtaacatcataatacgccttgaaagtcgcattgttctttacaacgttatgagttgcattcatgagggcataccgaagtacacgtgaccctcgcttgaacatacgggttcttttggcctaaaagtttccagactgatatacggttggatccagtccggcaaatgcaagcagttttcctggcgttgagaaccggtggatatcaccgatttcgcccagaatcatcccgccatttacggttccaatgccgggaatggtcatgagtacagagtgcaggcaggtgacaagatctttcgtgaagcgtccatgggaggatttcacaaggagattggagagatgagtcaggtgcagggaagcaatgctttttggcataggagcctctttttagagtgcatagacagctttctgatgcagaccggatttgaaaaaatattgaagttccggaaagacctgatccatataggaagtcagttgtatttttaaacgggtacgctgtttgacggtcttctggcggaacctgccaagttccttcagctcaatataatccagatcctccagggtagaaaaactgggggagtcctgcagtggtggggagatttacgcaggaagacccttaccggggagacgggctaaacctgttgagggaggaaatgagcctggaaaaactctcttggaattgtggcagaatcaaggaaatgaggcggcaacgctaaagcaaaatattttagcgccgaggagggaaggtttttaatgagtagttcatgggaatttttttcatacaaatcaaaatataacggtagcaatcagccataccatccgcaaaggaacttgcatttccctcacataattgccgaagtgcggtaatggcttttttgttcagatgagagagagtatgccttttggatggatagtaagcaaaatgatgtccccattcaagaaggtgattggtttcggacagtataacatatcctaatttagaaggagaagaccattcacctgaggcatctcccaaacgcaatgctttcatagcctgtttatagtggggcattatctccacatcacactcctgcaaggcaaaaaccataagtgaaggcagtatgagggcaaaggtctgatatagctgtaaaatgccctctctttgttttaaaatctcgaaaacagtatttgatgaattacaagtatcttttttgaagcaacaattggtgcaagacgaggctgaatatcaaccagcccttctgccctcaatgcgtcaaagacacggttaatcgtatatctgcttacatgaaattgctcgcaatacatccttgaagatggcaggggatttccaggaggtatttggccttccaaaatacaccgcttaatttcattatataaaaatgtaaattttgtttcttgtagtttcacaacccgcctcctctctgtctgaattatatcatgtcaaaccaatgctgtcagtataaaaagttatcaacctatttgtataccttaccaatatggatgttgccagaatgttaatataacatttataataaaacagtaaaattatttggaaagagtttaagaaccatggaaaaacaaaaaatcttaattgcagacgattcagaaatgaatcgcgcgcttttggtagatatcctggaagagcaatatgatgtggcagaggctgaaaatggtgtagaagcaatttctcttctttcaaggcatagaacagattattcccttctgcttcttgacattatgatgcctgagatggatggatttgaagtattagcttacataaataaatatcactggaatgacaccttcgctgttattatgatttctgctgatgattcccccgcgaatataaagcgagcctatgacttgggagcttttgactatatcagccgtccttttgattcgaccattgtccagcgccgaatttctaatacgatgtttttatatgcaagacagcagcgtcttgagaagattattgcagaacaatttcatgagcaggaaaaaaataataagctgatgatttcaatcctgtctcatattgtggaattccgtaatggagagagcggcttgcatgtattgcatgtgaatactattacaaaatatttgctaaagcagttggttcagtgtacagatcaatatcctttgtccaaagcagagatttctttaatcagtactgcttctgcgctgcatgatattgggaaaatctcaatttcagatgaaatattgaacaaacctggacgtcttacggcagaggagtttgaagtgatgaaaactcactcgatggtcggcgccaatatgctgttagacctgcccattgaacagcaggaagctccgcttgtcaaagtggcttctgagatttgccgatggcaccacgaaaggtatgatggcagtggttatccggatggattaaagggagatgaaatccccatagccgcccaggtggttgcgctggccgatgtatacgatgccttgaccagtgagcggtgctataagaaagcctattcacataaagaagctttgaaaatgattttagaaggacaatgtggtgcatttaatcctactcttttactgtgtctgcagaaaattgctgatacacttgaaagtgagcttatggatacttctcctgaacgggagtcaaaaaatattcaggatataagaaataaaatagactacgacagattgttttcctatgaaaaatacgccttcctgtcctgcaaacagcggcacctgcaattattatatattgattccttaactagtgtctacaatcgccgttattatgacgagcattttcaaggttcagatgatattcaagcgatggccgtaatagatgtagataattttaagaatatcaatgataattatggccacgatgtaggggatatcgtgttgcaaagcattgcacaaactgttttatcctgtgtacgaaaaacagatgccgtaatccgttatggcggcgatgaatttgtaattatcttttttaatatacctcaggatatattcgagaaaaaactggagaggattagacattccgttgatagtctgataattgatgaccgtcctgtattacatatgtctataagcataggcggagcttatggtattggaactataaagaaactcttcaaagctgcagacaatatgatgtatcaatcaaaaaaggcgaaaaaccaagtgaccatatgttattttgacaggaatgaggacaacacagacaacatttaaaaagaccaggaggaaatgtgattgtgaatctaaaagattgttatataaaatttggcggcgattttgatgaggtactgggcagactgcggcgtgaacagaccgttcagaaatttgtatataaattcctggacgataaaagctttagcttgtttgaagcatctatgggtaataaagactatgccgaggctcttagagccgttcatacgctaaaaggaatttgtcagaatctttcttttaccagattgtttgaaagcagcagtctggcaacaatagcgttaaaagaagatgattggaataaggctctcgatatgatgccgcaattatcaaaggactaccatgaaattattaatgctattgaagaacttaagatttccaaggaggaatagcgtcaatgggaaacagtaaaaagaagaattctacaacgcgttttctaatatgcagtttcattggacttttgctcttcagtattattatgttcagtctgctggggatatacatgagtcgaaagagtaaaaaggccgtttacgaaattggagaaatttatatgtccggaatgaatgagcagatgtccagacactttgaatctgtcattaaattacgttttaatcaggccggcggcattgtttctgttgtcccgacagatacgaacgataaagacaggctgtatgaagaactgacttacagggcacaggtcagggaatttgactatttagcactgtgttctgccgatggggagtttcaaactctttatggacaacccatacagccccttaaccccaaaccatttgtagaagcattattacaaggggaacagagagtcgctgtaggcattgatactgctggaaatgaagtcgtattgtttggcgttgatgctgcttatcctatgcacaatggcgatcggagtaccggtctgatagcagccgttcctctggaatatatcactgatttccttttcttaaaggaggaagggcagctgatgtattatcatattatccggccggacggtagttttgtaatacaaaattccaacacggagctgcggtatttctttgaacagctgcaaaagcagtctgattctgcagtgaatgaatcatcagctgaaaatccggttgaaaaatttagtgctgctctgaaaaaacatgaggaatatacggcaatattggaagtaaatggtgaagaacggcaaatttatggtatttcattaccttattctgagtggtacttagtatcggtgatgccgtatactatattggacgatgccataaataatctgggcagccagcgtatattcatgacattgttgtcttgtgcttctgttttaatcattctaacagtgattttcctccggtatttctccataacccggtcacagatgaatgaattggagaaggcccggcaggtagctcttgaagcgaacaaagccaaaagtgaatttttagcaaatatgagccatgatatccgtacccctatgaacgcgattgtaggcatgactgcgattgccgcagcccacatagatgaccggaaacaagttgagaactgtcttagaaagattacattatcgagcaaacatctattagggctgattaatgatgttttggatatgtctaaaattgaaagtggtaaattaactttggcaacagagcaaatttcattaaaagaagttgttgaaggaattgttaacattatgcagccacaggtaaagacaaaaaagcaaacttttgacatacatgtgaaaaatatcttgacagaaaatgtgtggtgtgatggtgtacgcttaaatcaggttttgctgaatctcttatcaaatgcaacgaagtatacaccggagggaggttcaatccatttatctctctttgaagaaaattctccaaaaggagaaaggtatgtccggatttatatcaaggtcaaggataatggaattggtatgtcgccggattttctaaaaagaatatatgaatcctatagccgtgcggatggagccaggatacataaaaccgagggagccggtttgggaatggcgattacaaagtacattgtggacgcaatggaaggaaccattgatattcaaagtgagcctgataaaggtaccgaatttcttcttacgtttgattttgaaaaagcggccgcaatgaatatggatatggttcttccctcttggaatatgctggtggttgatgatgatgaattattatgcagaacagccatggacgcactaaaatccatcggaataaaagcggaatggacattaagcggagaaaaggcaatagaactggtaaatgaacaccacaaaaggagagaggattatcaaattattctgttagattggaaactacctggcatggatgggattcaggtcgcaaaagaaatccggcataatctaggagatgaagtaccgattctgctgatttccgcatatgattggagtgaatttgaagcggaagcccgtgaagcgggtattagtggttttatttccaagccactttttaaatctactttgtattatgctctgcgtcagtatatgggcactgaaacagaaaacggccagacattgaaccccaatattgatttatccggacgccgtatcctgattgccgaggataatgagcttaactgggaggttgcaaatgaattattgtctgacttgggcgtagaactggattgggcagaagatggacagatatgtctggacaaattccaaaaatcaccagagggatattacgatgctgtccttatggacatacgaatgccccatatgacgggttatgaagccacaaaaatgattcggggactaaatcatcccgatgcactatctattccaattatagctatgagtgcagatgctttttctgatgacatacagcattgcctggagtgcggtatgaacgctcatatagcaaagcctatcgacatcatggaagtatccagattgctgaaaaggtttctgacttaaggtgccgtagaggatttttagagaacaatttggtaaaacttgactataatcagcagaaatatttataaactgctgattatatttttgtaaaagagtaagcgccaaatattcctgcggatttcctgttcctcaagtttcgcttataattgtagtcgatagatatttagactatttcactacaattatggaggataggttttggcaggtacccgcaaagcccgggttccgatggcggaacagatcaggcttatcaatgaatgccgccagagcggcatgacagatgctgactggtgccgtgaaaacgacattgcggtaagcaccttttacaactgggttagccggtgccggaaagtggcagcggatcagatcccagtagcgaattatggtcatcttgaggccccacgcccgaaacaggacgtggttcccattgacattgttccggagcacattccggaacagcatacagcatcacagatgcaaaactcgtaccttgacaattcacatacgattgaagttgctataaaggacatcacagtacgcatcagcaatcatgcagatcctgtcctgctcaccaggacattccgcctgcttcaggagctctcatgttaggcgatatctccggacttgaaaaaatctacattgtctgcagcttatcctctcgatatttttatcctcatctttttgagaaggcattgattttaaggcattttttcagaaaaatatgaggataaaaagtcatatgcgataatgaaatcacaataaaatcggaaggatgtgatttcatgaattacgacgaaaccgtaaacaaagtaatgatactgctgaaagaaaaggagatatgttcaagtagccgaaagtcacacagagattgctatgagtccctcaggctttttataaagcagagaaatgaggagtattcagattgtattcgtgaaggttggatatctgagatcaaaactgaattaccacggcagagatgtgccatatggatacagtatgtttaccagttggaggagatggactccacagggactgtttccgaccgcagactttatcttaatcagtcaaactatgacaagctgcctttattatggagaaaagatcttgacatatatctggatgattgtagtaaacgctatacaactcgtgcattagaattaacccgtatttactgttcttcaggcttattctttctggatgatatcggggttcatgctattacggaggtcacctatgactcgattataaaactgacaaagacaaaaatgtattgttctgatgatacaagagccgtgatactgaataatactgcgcgaatgatcaggttttatggtgaaaagggactttgccctatgagctatgttcttgtttttgactgccagatatttcctcatatcggattactgtcggatttctctgatgaaagtcttacagtgctccggaatataacgagtgtagccatgtcggtggacagtttctataattcaatcgtaccttttattgaacttttagaaactcatggatatgttgggacaactttgaaacttgctaaacatgcattgactgcattgtatctttttcttgatatgaatcaattaggatttcattaagatatcatgtggatctggttcgcagaaatcagaaaaacaatggggacttcatggctccactggaggcgtgttctgaaattttatgaagattatacccttactggtgatatccatccgaatggtaagtacagataccagcctatcagtttcgataaactgccattatggtgcagagagccaatagaaggtcttttggaacagaaaagacgtgagtttcgagagccaggtacaatcgatagttacatgtattcctgtacccgtttttgtatgtttttgcttgatcatggctatgaaagtttcaagaatctttcattcgctgttgtaaaagatttttcattacatgatgagcatgccacttttgcgggaagagcaggacgctttgtcattgtaagggcatttcttcgttttcttgatgaaaacggatatacagatgtacacaagctggatctatgtttgatgaccggtaccgctccgtgcgataagatcattgatgtattatctgatgagcagattcaaagaattcatacattccgtacagaacataatacccctgtagaacttcgtgatattgcgatagtattacttggtctgcggatgggaatgagggcgtatgatgttctttctctccgttttcaggacatagactggaaaaaacgacagatttcaataatcatgaaaaaaaccaggactcagatcacccttcccatgcctgttgaagtgggcaatgcgttatatctgtatataaccaaaggaagaccccggaataatagcggatacattttcataaggtcaaaagctccttatggaaaacttacaggtaagatatgtaccaaagcgctttggcgtatccttcctgaacgaaaagatgtaaaaggcggcggttttcatgtgacccgtaggacatctgccacgaatctcttgcggaaccatgcagggattgatgatgtaatggatgcacttggacaccgtgattccacaagtgtcatgaagtatctgcttctggatgatgaaagaagcaggaaatgtggattatcactggagagtacagggctccttttgagaggagggctggcatgaagatgggtgaatactagtacagcattgccaaaataataatgaatagacgttgcttttttattgtagtcggtgcataataattctatcactaaagaatggatgtgttattatgcgaaggaaaacaattgatactatcccggttttatctgatgccatgaaaaacatattatctgctttttcaaaaagccgctcccttccgtcaggactggtcaaaagagccagcattgtcctgcttgcgtcacagggggaactcaaccagaatattgcaccacaggtcgggcttcattataataatgttgccacctggcgcagtcggttcctcgcggcgctcccagccttgcggaggattgaaatggacgacccgaaaaagcttgaagatgagatacgggcagtcctgtccgataaaaaacgccccggtgccccgtctgtttttacgccggaccagatcatgcggatcatcgaccttgcctgcagcagcccaaatgattttgggtacgaagtaagccagtggagtctcccgctgttagtggcagaaattaaaaagcaggggatcgctgaacagatttctgagaaatctgtcagccgttttttaaaaatgaggtagatttacatccccacaaaatccgttactggcttcattcttcggaaaagacggaagccccggaatcttttgcgcggaaagtaaacgaaatctgcggcctgtaccagagtgcccaggaacaaagccgggaaggtgcacacattgtttccacggatgaaatgaccggggtacaagcgctggaacataaatatcctgacaagctcccattacccggccagtgcgccaaaatggagtttgagtatatccgccatggcacgaccagcctcatcgggttctttgatgttgcaacgggccgtatggaaatgccgtatttaaactccacacgcacagaagaggattttgtggaagccgtgaaagcattggtagggacagacccgcaagccccatggacatttatatgcgatggcctaaacacccataaatcggaagcccttgtccgctttgtggcagaagcctgtgcccttggcgtggaactgggcaaaaaagggaaaacagggatccttaaaagtatggaaagccgagcggatttcctgcatgacccttcccaccggatccgctttgtctatactccgaaacacagttcctggatgaaccagattgagatatggtttggcatcattaaccggaagctgctgaagcggaaaagctacctatcaatagaagaactggaagcaagcatcctgcgctttattgaacaatacaatcttacagcacacccatttaagtggacatatgccgggataccattagtaatttaatcactgatatttaagcaatgctgtactagtataactcaattttaataagtttacattattatcctgaaaaccaagggaaacgtgcgcccaaagcacggacacgtaagccaagaaatcagattactaccaatgcttaaattgtaagcttatttaaatcgagttatactagttcaaaagctgtttcgcaccatatcttgaaaagtttataagcgaaaaacgggctgtaggttttatatatgaaagcgaagaatggaaactgaaacgctttgatgccttttgcatagaaagcgcagttacagaaccttgcttaagcagggatcttgtaaaggaatgggggacattgcgtgatggcgaagctcttgccacatgctcttccaggacatctgtactacggcagtttgcgctgtttctgacttcactgggtatggaagcatatattccatcaaatttctacaaggcagagaaaaacgtagttcacatcctgtcagaagctgaaataaaagcgttctttgaagcagttgacgattgtgttcctgctataaaagcgacaggatttcatagattagttaccgagtataaagtgatctttcggcttatctattgctgtggtctgcgtatttcagaagccaggaagctgtattggaaggatgtggatcttcaatacggaacaatccatatatcagtcgaaaggtcacaaagaccgattgatctacatggccacagatctgactgaactgttacaggcatacgctaaagtgctgcgcgataaataccattgtctgtcagactgggttttcccagcgcgggagacagataagtgcctcagtgttggtacaatcgataaaaagtttcgtgatttctgggcattaacaccttttgcagaatcatgtgacaaggctccgacagtccattgtcttcgccatgcttttgtagttaaaagaatgaatctgtggatggaagaaggggttcctttaaaagaaatgctccccttcctcagccggtacctgggtcatcagagcccggatgaaacattctattattatcatcaggttgctgaagcattccgtatcatcagggataaagatgaaactggaagatatgtgatcccagaggtaaatgcttatgaatagaaaaaaatctcagaaaaaactgtttttttcgaagaccctcgaatttcttgagcattatctcccggatcaagtattaaaaagtagaaacacggttgaaacatatcgggatgcattgacagttttcaggcgatatgtaacagatatcaggcacctgtcgatacggtcattcgggtttgaagactgtacacatgattttttattgtcatacatagagttcctaaaacaaagtggtaatgctgaaacaacatgcaacaacaggttagctgcaatcagagcatacctatggtatgctgcagacagtgatatttccctgcagacagtagctttgacagcatcgagagttccttttctcaaagtacctaagctgacacgggaggtgatatcggaagaagctcttaaagcattacttacagcaccaccccacacaaagattggtcaacgggatcagctgattctgatactgctttatgattctgccattagagtctccgaattattatccctggatgtatcttctgtaaatctcaatgcggaaataccatatctgaggatatatggaaagggtgataaagaaagaatcgttgctatcacagaaaaaacagtccgtcatttaaagaattatctgaacctctatcatccaacaatcattcctgacctgcccttgatctatacaatgatcaaaggccgaaaagacaggatgtctgtaggaaatgtagaacgcatcataaaaaagtatgcgtctcagatacggtcacagtacccagattttccagaacactgctatccacacatgctgcgtagaacgcgtgcaacaaatctatatcaggatggaacagaactagagcttgtttccaggatactgggacattcttcgacagaaacaacacgaatctatgctgtcccttctatagaaatgatgcgaaaagcaatggagacaggaagtttatcaacggatgagaaaccattgtggccagatgatgaagaagaaatggcacgtatctgtgggttaagatgaaaaatgttatcctcatcatttatgatgtaaaaacgctcaaatacagctattctcagaaatgatgaggataaaaatatcataagaataaccccgtgaccaggtaaaatttcgccacaccggacagatcgtctaacacagctgacgcagggcaagcaaagtattgcggatcacttcagctccagcctgttcgtggatctcgatacggacaccctgcatctgaaggcggatcgacggcatagataaaggagctgtttcagcaggatcctgttccgtcttccaaagtgggagctggactacttcctgtttttgcacagccgtatctgctgctgccgggatctcacaggcttttttgcgcagagcccggatatgatagtaaaacgtgctggcgggaatcccgttttgtatgcaccattggcggtcagtaaggccactggccctgcactgtgtgatcagttccagccattgctcattgtttgaagttgtactcatttgattcatatcctccaatgtgagactttagagtaatcaggtacaccaaaagcgacagaagctgagagattgaagcatagcttttgtgaatctgagaaccagatatgaagtgaattactccaagtatctgaagtatctcacaaaagttggagttttgctatccggtcgattataaagcgcttactataggtcaacaactgaataaagaaatttaaagccctccacaatttctgcggagggctttagactgtcaagctggttattgaatctctcgttatttactatggtacgacctgtgtagtgggcttctgaagcctttgatagagtgcttgagatttatagatatttacatccatcaaggcatgccgtttttgcgttggattactggtttcgttagaggtacgatacgtcaccgtacagtatccccccggaagctgagcgtcccatcgtcgaaatgcattttcaccatatggaagttctttgcctgcaaaagcctgataaacctgctcttcatcctcgaaaccaccataaagcaacgtagcgaatacgatttgttgtttccagtcctcccacgacatttgctctgagacatctatctgatcaaatactgtaattaacacccgttcgccctcgatagttacagaggaaagtaagtaagtaataatccgtatcttgacaaaataagaaatcccccagcacttaccgggggaagatctgtcttttactttttaagtttgctgcggcaatcatcaggcagattggaggaccatgggagaagctccagcatttcttcctttgccggaaacgcaccgagttctttcatcttttccatcacatatgtgagatagttgtatggcttcagtccattcagaagcgcagtttctgtgatgctgtacacagtcgcactggcctgtgccccgcggatgcttttggcaaacagccagttgcgtctccctatggcaaaatttttcagtgcccgctctgcagctagattgtcaatactcagatggccatcttccagataccttttcagataggtttcctggttcagcgtatacaggaccgcctctccgatcttagaagatctgtccacagcatcctccagggtatgaagccactcgaaaaaagcctctaaaagcggctttgcctgcttttgacgctcttcatacctttcttccggtgacttgtcacggatcatctcttcgatcttatagaacatcccgatccgtgccattgcctgatatgcggttgtttccttcagctgctctttggtaaagtcctttttcaaaacggtcagggattcatcaaatctgcgcctcgcatgggccatgcatcctgtcacggtgatcctttccggaaggctgtggtatgcctggtatccatcgcaggtgaaatatccctggtactgatccccaaggaattccaccggatgatatcccgcccgggttctttcgtattggaagaggaccatccggggtgcgccgctgtattcatcagtgagatagacccacatccagttctgggtggaacctttctgttccggctcatcgattacctgaacacgggtttcatccccatgagcgtaccggctccggaggaattcttccttcatcagttcataaagcggctgcagataccggtccgcacactggatgatccaattcgccatggtctttgtggaaaggttcaggtcgtaacgggcgaattcccgttcctgacgcgcaaggggcatgccgcccacatactttgcgttcatgatgcctgccaccagggatggtgttgccacactgcctttgagaagggaaggcgccttttccggacgtttcatcgccccgcatttcgggcagctgtaaacataggtgacctcctccaccacttcaaaccgtgcaggcacaaacttcaggcgcttcaccgtctcttttgtcacgactttatatttggtattgcagtccggacagtttcggtccgcgccggtcagcttatactcaattacttccgttgtctcaaaggcggaaagatcttcctcctttttgccggaacgtttctttcttttataggaagacggatggatctcctccatttccggctccggcgcatcaggctctgcttcctgctctgcctcgttaaaaaggttcagctgcgtatagccatccgcatatttttcgctggatgggccaaactgtttccgctgcgcaagagtcagacggtcagaaagcatcgcgttcaggaattccagttcctttgttttttcttcgaggatctggatctttgtttcctgtttctgataatgctcccgcatggttttcatcagggagatgatatcctccctgctcatcttgttcagttgttcctctgtaaaaagcggatccataacacagcctcaactttctgaaatctctaccagaaagtataccagaaaaagcattccgttcctataggaaactgcattccgggacggaggaaaatccgcccaaaacaaagtgattttcggctttttgcgaattgacaggatccgggctcatatgacgatcttcgggtgacgttcttcaaatgcgccgctggggttcagggataaaccatcgcacagccaatggatctctttcagcgtaactttctgcagttcatccggtgtgtcaggccaatggaaggaatcgcggtccagccgtttcatcaggatccaaaaccctgacccgtcccactgaaggatcttgagcaatgtgcgcctgcgattgcagaacgcgaacatacagcgggagtacggatcgagatggaatttcagtttgatgatggccgctaaaccagtgtagctcttccggaggtccgtgcagccacatgccagatagactgtagtacttccgtaaaaatcaagcatagttctttaaggcctgaagcagggcagtcaacagtctggctggacagtccgcagcaacttcaatccggatattttccgggagacagagcatcacaggaggttttcctgtatctgctgtactgaaatggagttcatgttccgaagggagctttgcaaacaccggatcagaagcactttctgtctcagctgcttctgactggagctttcggatccagtaacccagtgtagactgtgggattccattctgctgacaccattctttgcgggataaaccgctttcctgaaaagcatggaaccggtctgcccaaaggtcagcctttgaggttacattgtcattcgtatttattggtatcacctccatcatttgaacttatcttatcaaatgtggatggaaatttgcagatactgattattacctacttacagaggaaatacccgcaattaacaattttgtgctgggattggcattggcttcctctgtactaattgtatctgaataagttatagttgggctgcgcacaatatgcattctttgcccttcagccaaagaagtggtttccgattcggaaagtattcctggcaacccagatttttccaacgcaacgataatcacttcttcatctaacgggaaagttggttgaggtaatacgtcttttttgtagatagaaacaaagcaaagcataccgagcacgccaacagcaagaaatacgaatatcaaccgtttcatataatcatcatctgcaatctcctaatcaatagccccatgttgacatgacttcgtgcgggttatccccagctgccaaactttttcctggcttggcccaaaaaataactgaatcccaagcttcaacatgacattcaattctcagcaatcgaatcccctggaaagttttaggggatgtgtatccgcatgtcgtgcatgccgaccaagcatagtgatgataatacgtacagatatctgatattaaattaggatcatcaggacagggcttcgggtcagcaccccattccaaatcgttagtataccctttataagtgttgttcccacatttaggacaaagaattcttggttgtactggatttggataaatgaatgaatagcggtaatcaggattatattttgaagaattataaaattccattatctgatcctgattctctacatgaatttcgattaactcacgttcatctttaggtgctgcaaaaactaccgctggaaaacattttggttaatattaaatatatttttgtttatttttcacatacgacagctaacactacaacaaaccaatgtcatttagttaagctcgttgcttagattccggttttagggtctaaccaaattttttgcgatttaaaaaaaggtcgttgacaattcagtcaaaatgtgcagccgctttcgctgaaaatccttgcagcgaaagcggcccttgtagttaagacgtgttttcccattcacgattatcaaaactacaaggaggcgcattttatgctaagatcccctgaaactgttaaatcttccctcttgggcatagtttctgacatggctaaggatatttcctcatttgtcaggaatccagcaaccgattttacccgtgaccgtaaactaaattttaaaaatacggtcagtctcatcctctctatgggcgggcagtcccttaattccgaactcatagattatttccagtatgttgaaccggaaattccgactgcctccgccctgatccagcagagtgataaactcctccccgatgcgctttcttacattttccatcacttcaatgacccccctaaagcttcccgcaatggtttccggctccttgcagcagatggcactgacatcaattttaccagcaacccgctgttggaagattactaccagaaacccggacgctcaaacggcggtatctgctccgtccatctgaacgccctgtatgaactcggcagcagggtctatacggatgccgtcatccatccatgtcatgcaaaggatgagttccgcgccttttgcgatatggtggatcgttacccggattcggaggccccgcacaccatctggatcgctgacaggggcttctcttactttaacacctttgcccatgtcatagaaaagggcggcttcttccttatccgcaccaaggatgtcgcctccaaggggctggctgggcggctcccgcttcccagctccggtgtgtttgaccttaccgtgacgctgaatctgatctgaaggcagaccaagcacctcaaatccctccccggggaaacgaaattcattgggaaaaacgtttcctttgatttccttgactacggggcggacggcatatacaccatggcactccggttcgtccgtttcagactgcctgggggtggggatgagtgtatcgtcaccaaccttccaccggatccgttccctctggaaaaaatccgggagctttacgataaacggtggagtctggaaacggctttccgcgaattaaaatactccattggaatggtcaatttccacagcaaaaagccggattttatccttcaggagatatgggcaaggctgacactgtacaatctctgtgaggtcatcacagggcatggcgttgtgcaacagaaggatacaaagcatgagtaccagctaaactacacgatggcaattcggatctgccacaaattcctcaagatgctttcttgggcataccagccggatgtggaagcgctgatcgggagatacctcctgccggtcaggagaagccggcattacaagcggaatatcaaatatggacataccgtcagtttcctctatcgggtggactgagagacagatcccttccctatgcagttttttaacggcagacattggtctgtctgtttgtcgtgccatccataacaagtcagccgtatattcagttttttttccttgcccatctgtacgacagacggatctatcgtgtttttcatcagttattaccccttttccctcaaaatgacttcacagtctatagcaaagctcacttaactaaatgacattggcatctgaatggtaaataaatggattgtcattactaatcctgaattattcatggcgatagatttctaaataaagccatcaccataaggattgaaaatgtacatccctgaaggaaaaatacaaaagttatctacaaaagggttaaaggatttctagactaatttggtaaaatcattgtgtttgtctcttttgcatgatagaatctttatgtataattgaacagaagtcagaggatagtctgatgatttccttcggaaatagttgaaggaggaaatgtaacatgaatacacttgaagtgttgacattagtgctggcgatttttgcggcattaacttacatagataatcatcatgacaaaaaatagctatcctctactggcatagaggatagcccataactaaaaattatgtagttatccgaagcacaatcatcagacgcaccaaagtcttttgattacttctaagtaaattatacacggggtacttgattttttcaagtaccctttttgattttttagattttggttttgtcacctttggctttgtcagcagtccatttcatggtctgtgtgtggttccctgtaaaccggtcgaatgtataatattagccacaacttaatgtttagtaaaagcatactcccttatacggaactgtctaaatatggataatatcaggggaatggaaataaagggtattaaaataatatattttgtaatccgacctgccgcttcatcacatagtatattcggatctgtttccgctggtgattgcagaaatgtttgctgcgtgcgctgcaaatattatgaatttaatgttggtaaagggtaaaatctgagaatattgcatatgctatcaatcaaggattcctgaaatgaagaaaacttaaatcagattgtagaatcagtgggataattatataaataaggcaatatttttatgtaagcagcaggaggatattcaaatgtatgatataattattattggagccggaccagctggtatcagtgcagctatttatggaaaaagcagaggaaaaaggattctgatgttggaaaggggtcaggttggcggtttgattggaactgtctcgacagttacgcactatacggcaatcatgaaagaagaatctggtaagacatttgctgaacgtatgaaagagcaagcacttagtgccggtgtagagattcgctatgaaaaagtgacagaaacaaagttcatgggtaaaattaagaaagtcgttacagataaagaaagttatgaatgtaaaaccgtaattctcgccaatggtggttctggccgtatgttaggaattccaggtgaaaatctgaaaggtgtccgattaaacgcaccaaaagatggtcctgattataaggggaagaatatctatatcattggtggagcagatggagcagtaaaggaagccatttatctggctggaattgcagaaaaggtaacaatcgtatgcgtggaagatgaacttgtatgtatacaggaattcaaagataaagttgccgcgctccataacattgaaatcatgccacattcaagtctcacagcagtatatggtaacgaaagagttgaggaacttgaatttacggacaacaaaacaggaaagaaacagattgtaaaagatgcagagtgcggagtatttgtttatgcaggaattgttccgaacactcagatatacgcggaattgaagttagaaaacggatatattccagtggatgaattgatgcagacagaaattccgggagtatttgctgctggagatatctgtgtaaagaaagtaaggcaggtagctacagcagttgctgatggcgcaatcgcaggaatacaggcggcagcaatgtgttaataaagagccgggattatcctgcttttcatccaagccggcgagggtaagtgcttccaattccaaagaagctgttcaatatataaagaagaacagcaataccagcaaatcggttttcttatctgccaaaccaccatttatatacaactgttttccgcgtgcaaaaataatctaagcatagcaggagcgataatctcacttcgggccaatggcatcattttgtgtatcagtaattgtatcaaccattgaaatgatgacaataagtgagactgggattttaggctgtatcatgaatatattatcctcctgttcttttgccggtgttgcttcggcaatctacaagaagaaaaaactttgcaggaggccatcattggattggcggcagggtgttttacgatgatttgcattatgcttttatggaattatttgattaccctcatttatatgggatatccccgagaagctgtggtgcagttactgcttccagcattccttccgttcaacctattaaaaggcggattaaatgcagcttttacatttttgctctataagccggttgttcatgctttaagtaaaacaggcttagttagttgaagcaaataattctaaaccggcacaaaagcacaatggtctgataatactatcctgaatttcaatcaagatattacagacaatcagaagccaaacttgccaaagagcaacgcaaattatcccttatgcaaacaggttccaataaccgcaataaacagcgtatcaaggtagcaggacttcatgactcatcattgattttttgtagagcaggcattatacttattccattaagggaaggaggcttaactatcatggcagttaacaagatgtgtgcatagcaaaggctatgtttaaaaattaatatagcctttgctaatcctaaagaaatcttaggaggtgcacattgggctattataaagcaactgatattctgccgccaaaaatactggagatcctgcaggactatgttggatccatttttcttcatggaaatactgcttcttccaaaatgtttacaaatattcttctgagtgcttttgtggagggaatggaactcagcgatctttatcagacttatagaaagataaagaaaaatcaggcaaacccttttgataagatccttctccttgtggaataatgtgaaaatctttacgggctcaggagcgtctgtcatcggaaagtctcccttcataccttaaagagactgcgaaaaaagctgtacaggatcaggctgaggaagggattgtatttgtccatggaacgggacgcagaaaaaaccatctccagaaatcgattgaaatactggaaacctacataagcaaactcaaagaatacagtaaaaaactctatgtgtgtggagaacgcaatagttattccaaaacagacccggatgcaacctttatgcgaatgaaggaagatgccatgctcaatgggcagttgaaaccagcttataatcttcagcatggagtagattcggaatacatcacatggctggatatcagtccccggcctaccgattcaaggacactgatcccatttctgaaagagatggaagcgtacctttcgtttaaatatcaggagatcgtagcggatgcagggtatgaaagtgaggagaattatctatttctcaaagggaacggccagctgagctatatcaaaccccagaactatgagatttcatgtcctttcaaggcagaatgtataaaaggaaacaactgcaaaacaccactggaagatcgtcagaaagtgctatacgtttcaatgaaagaagtatcctgttggcgatcggatataacatcaataaactccatcacaaaatccaggcaggaaggacagggctgcatttattcctactaaaacaagccacctgatttagacagttcaaaacaggatcctgaaagagaaccttttttcaacaaaaggtttattaaagtttgctatttttctaaagaggtataatattaaggggatatttcggaaaaagagggcaaaacgaagctgtcgtatctatgatttcctaatcattgatgcgacagcccctttcttttaatgtacctgaaaaattacccaactggcaatgcggtacaggtcaatgtgtcaggattcctcagatatatgtaagtcatccgggagactgcggtattcagtgggggtcagaccggtcagctttttaaaattacgtataaaagtctgttgattattaaagcctacaaaggctgcgacttcagcaatagttatttgtgttgtgcagagtagttttttcgcatgttcaatgcgcagaccggacaaatatgtgatgatatcgcatcctgtttcttttttaaatagtttgcttgtataagctgggctgcatccgatataggtggccatggtttcaagagaaatgtctgaattataattctcactcatccattttatcagatggtcaatctttactttccctttattagcgctggctgccagaacaaggccgcatacatcctgaacaagaggtagaagaagttgaccaaaatcatgtacttttgtcattctgttcagatcctccagaacctgttcttgaagttttacgcagtctgcataaataacaggcatatcttttgttgtctctattattacattgataatttgtgatgctgtctcttttaccgatgcaacagaggtattgggattggcgtggataacggaaaaataggacttgagaaagtcctcggcctccggtgatttgcccaggcggatatatctggaaagaagttgttgcttgttataatcgaactgcacttccgaacgctgaaactcctcatagcaatagggaacgatcagatgattatggatcttgtgatttaaaagttccgcggcagcgctataggagtgatgaagctcttcaatggaagaagtgatggttccaaaagcgattatgggaggtttgtcattgccggcagcacaaacgctttgcagtacaacccccaatttattcatgcccaaaagacggatgtcatctgagtgtgtcttagacatatccaatataccaacaattgttccgggattttcccataaccaataagacggaaaatatttgtccgaagcggtctggcatgtatgcagcagatttttttgggcatcgctgaactcggatttgtggagattgtaaaagagctggatggaaaccggaacctgtattaacacgacagacacacattttaatcgttcttcaagtttcaaaaaggcaatactttttacaatgccttcttttctgtaatctgttccgcagcacaagtcaagcagcagttttgactggagaacctgttggttgagagctagaatggaacgcaatgcagctatctctttttggtcatgcgaatatgtcacaaggagagaacgatatcttttgtagaatatatatgcaatgccagacactgccattaataaaaaaaaagcaatcagaacccccatggttgttcctccctgtaatgttaaagaataagaatttatttggtttcattatagtataaaaaatatgaaaagacaagaattggacattgagaagcagtataaagcaaaagcaaaagcataagtaacatcttaagatgtagtggcctatttcggaaaatacaaataaaaaacgaaatatacagcatgaaaagtacagaatttgttaataaaaacagataatgactatatactttttgatgcctcagagctagtttataggagtagggagctgctggcagtaaataatacctgagatcgtcagaatcgattttgacatagcaaaaaggaggataaaatgaaagcgtttatgattgaggataccagatttgccggtttcattgaggtggaagagccgcagatctgcagccctaccgctgtcaaagtacaagttgagtcagttggtatatgtggaacagatattaaaatttatgagggacatcattctcaatccatgggacaaaaaaggattcccggacatgagtttgcgggggttgtcacagagataggagagcaagttaaaggcttaaagaaaggagaccgtgttgtccatgagccgatctcgtactgcggccaatgctacgcctgtttaaaaggtgaaggaaatgtgtgtgcacaagtgaaagtgacaggctgcaatatgtccgggggactggaagaatactttgtgtcagatgagcggcagtggcacaggattcctgactggatcagctggaatgaagctgcattgatcgaaccttataccatagcggcacaggtatgtgcccgggctgaactggcaccagaagacacattgctgatatatggggctggacctatcggtctcatgcttgcagatacggctatacatatgggggcaatggtaatgattagtgaaattagtgacggaaggcttaggatggccagagaaattggaataccatatgtaatagattctactagggataatctcagggagcgggtcatggaactgaccggaggctatggacctaacattattgcggactgcgcaggtatcgtgcagttggatgaggaagcgattgacatgctgtccccatgcggaagattcgtgccggtagcggctgtaccctttatgtttgatggttataaggccatgagaaagcagttgaaaatcgtggcttcaagacttcaaatgcatcagtttgcacctgtgatttcaaactttaggcagtatcaggagcacgcggacaggataattacggatgtttttgatttcaaggatacaaaaaaggcctttgcccttgccggccaaaggcgtcctgagacggggaagattgttcttcgttttaacaaatacatggattaatggaggaatcggttatggatacgattgtggtggtttatacctctatgggaggcctgattaacacgatgaaaaaagaactttcagcagcgctgccggattgcaggatagtaaatatcgcagatgacagtctgatcagggaggttgtggaacacggcagagtcacggacagggtgagggaacgcatgatgcattactttcaggctgctgccaggtgggatcccaaagtgatcatcagcgcctgttcttctgtgggagaggttgcggaagcggcagataaaacactgagtgtaccggttatccgtatagacagggccatgattaaaaaagctttacagcatggggacagaatcggcgtggtggcatctctggcgaccaccatggagcctacggcatcttatatccgccgcctggccgcagatatggggaggaatgtccaggtgatcggcagagtggcacaaggggcatatgaggccaacagtcagggacggccggaacttcatgacgatcttatcagaaaagaggcagaggtcatggcgggagaggtggacgtattgattctagcgcagggttccatggcgggaatggaagcgtctctcaggaaagacacaggattgccggtatatgcaagtccatgtctttgtgtaaaggaagtgcaggagatatgtgaggtgaacagatgataaagttgacagaggaaagggaaaaagagctggaagcactttgccgccagtttcggattgacattatatcaattcttcatgaattgcagacaggacacgcgggaggctcgctgtcagagtgcgaaatccttgtaacgctgtacatggagtgcgccaatatttcaataaaaaaccagtatgacagcggcagggacaggattgtactttccaaaggacatggagcgcccatgctttaccgctgcctttgtgaaaaaggcttttttccaaaggaggaaatgcatacattaaggcagccgggcagccgccttcaggggcatccctgttctgcgaaaaccccgggagtggagttgtccacaggacctttaggcattgggctgtcggcatcagtaggaatggcttgcgccaaccagcttatggggaacgatgcctatgtatttaccgtgatgggtgacggggaattaaatgaggggacgatatgggaagcagccatgtctgcggtgaagttcagatgcgaccatttgataggtattgtagattggaataaagtgcagttagatgggaccacggcccaggtcatgcccatggatcatatggaggagcgctggaaatcctttgggtggaatgtcctgacatgtgacggacataagatagccgggatttatacggccattgaagaggcaaaaagcatgagaaatgggaaaccatgtgtgattctcgcagatactattaagggaagaggggtatcttttatggaaggtacaaataaataccatggaaaggctgtatcagatgaagaatacgcgcaggcaatgaaagaactgggaggtataaagtgatgggaatggcgttaagggatatttacggtgaaagtcttgttaaatatgccggtcttaatgacagggtagtagttctggatgccgacctctcaaacagcagcaagacctgtatgatggcagcggtctatcctgagagggtatttgatgtgggaattgcagaaggcaatatggccgccatgggggccgggtttgctcacagcggatttattccatttgtcaataccttcgccacactggcgtcttccatgtgtgcattatccgccaaggcactgattggatattccggattgaatgtgcgtatcgtaggttctaacaatggcctgggaggaggatatgatggagccacacaccatgctatcgaggatattaacgtgatgcggggaattcccggaatgctggtcatgtcgccctccgatggcattatgctggattggatggtgaaaatactggtggaggattataaaggaccggcttatgtcagcatacccagaaacggatacgagaacatctatgatacaggagaaaactttaaaattggaaaagcaaagcagctttcggagggaaaggatgcggctatctttgccgcaggactatctgtttacagggccggtaaggcggtggaaattcttgcggcccagggaatcagggccagcctgtttgatatgtttacaataaaaccgctggacagagagactgtgatccgtgcagcgggtgaaacgggagcagtggttattgtggaggaacattcaattattggcgggcttggaaccgcggtactggaggtcctggcagaggagaagatccaggcagagatatccagactcggaatacgtgactgctatacagagagcgggagctatgaggaacttgtggagatatttggccttggaaccgattcgattgtaaatgaggtccgcagtgtggtttccagaaaggaggatatgggatgcgggaggagataagggatttatataaaaagagctatgaattgcggctcgatgctgttaaaatggtttatcatgccaaaacaggccatgcggctcccagtctatccatggcagatttgattacggcaatgtactttcacattttgaagcttgatccggccgatccgggcttaaaggacagggacaggtttgtcttatccaaagggcacgcgtgtcccatctactatgcggctttggctaaacggggattctttcccgagaaggatctgatggaatacaggaagttaaacagcagtctgcagggacatcccgatatgcgcaagtgcccgggggtggatatgaccacaggttctcttggaaatggattggcggcctcactggggatggccctgattgggaagaagaacaggagcagccattatgtctatgttatctgcggcgatggggagctccaggaaggaattgcctgggaaagcgctatgtatgccggaaatgcgcatcttgatcatctgatatggattgtggactgcaatggcctgcagtcagggggaagggttgccgatattcaggatttggggaatctggagatgaaattcaaaagttttggatgggatacccagaccattgacggccataacatggaggagatcctggacgcagttactacagctaaagctgctaaaggaaccccttctgtgatcatggccaaaacagtaaagggaaagggcgtatcctatatggaagaccagtatctatggcatatgaaagcgcccaatgatgaggaatataaaatcgcagtggaggagctggcagaggaggcagggaaatatgagtaagatggtttctacacggacaggctttggtacaggactggtagagctggcaggaatgcgggatgatgtagtaactacttcggcagacacctatcgttcgtttgccctgaatgaatttgtagagaagtacccggaccggtattttgagtttggaattgccgaacaggggatgctgacagcttccgccgccatggcggcagaaggctgctgtgtcttttccgtgggttacagccccttcctctctatgcgcgggctggagcagatacgtacatttgccgcatatcccaacctcaatgtaaaggtggccgcgggtctgtcgggactgtcaggggatacggacggggtaacacatcagggcacagaggatatcggaattgtcaggactatccccaatatggcgctgctttgtcctgcggatgcggttgctgcaaaggcatttgtgaaaatggcggcagatcttcaggggccggtttatctgcgtctcggtaggggggcaacgcctgtagtttatgaagaaaatcagaggtttgagtttgggaaggcaatacatgtccgctgctatggcagggaggcggtgatcgtggcctgtggtccttgtgtggctgaagcagctagggcagctgaccagctgaaagaagaggggattatggttacggttctggatatgtatacgatcaaaccgctggatgtagctaccctagcgggttgctgtgaaggggccgttagcgtcataacagtggaggatggtacggtctgtggtctgggaagcgctgtggcggaggcactgatggaacataatgtacatccgaagcattttaaaaggttaggaatgacaacatttgggacagcaggaagcctccctgaactgttgggcttttttggcctggattccaaaggtattgtggagagtgtccaaagccttcaatagacggcagatagaataaggaggaattgacagatgagttacacattggatcagttgtatggtataagaggccaggtgatcgtggttacaggagccgcaggaggtatcggtttggagctgtgccgggcgatccgggatttgggcggcagggtggcggctgttgtaagaagagcaaaaagccgggaaaaagttctggaggcgcttcattgcccgaatttatccacagaaaaggacatactctgtgttattgcggatctgacccatgaggaggctgtaaaagcggcaatggaacagattgaccggcattttggaagaattgacggactggtaaatgcagcaggaatgaatataattgaaagcctggagaagatgacgctcagtgatttccagaaggttatggacacaaactttacatcagtggcaatctgctgtaaatatgcgggagtctatatgctaagagcaaagaaaggccgtattgtcaatatttcctccctcagtactgtcaaagggaaggcatactacacagcctacgcctccagcaaggccgcggtggacagctttaccagggcattggcaattgaatgggcccaacagggcattaatgtcaattcagtggcgcccggaatgatagtcacggatattaacaggaaacagattgaagagaatccaagatcatatgaaaagcggattgagagtataccgcggggctgcgcagggagaacagaatggctggtggcgcctgtgattatgctgctctcacctggctccgtccacatgacgggacagactgtatttgtggacggaggctgcacggccggggatacgtttgtaatggagacagaacgtttcagatagcaatatcctcatccgggatccaggcgcagcgaaagccgatgcgcctgccagcccggtcccttggcctggcaacattctaacgcttcatcatagctgataaaatttctgggaccctggtccggaagactgtaagcacactttttcgtgatattctgatatttagagagccagacatattgcacttggccccgggatgtctgaaacatggggtgaacggcatttccagcatgggggatcacctgttccagacaaaaacaaggaatccttaccatcagggatggaagaccggcatcatcatacaccagggtatttgtccgccctgtaagcttttccacgattattttagcaggcactttatattgaagcagggtatgaaaaaatctggtctgtccggtgattttggcacagcggtccgcgaagctttccaggataagcaattccattggcggatagaaagtatgatctggcagcacaaaatccccttacaatattttcagatgatttttatatgtctccggtgaaatggtattgcaggattccatcgaataaaaataatccagtgcggcacggcggcaggtttcgatatgcgttttcattaatatggcggctttttcataatttttgtcaatcaaagtgttgatgatatccagatgttctaaacgggcatcatggatctgcactctgttctgtttacttgcaatgaccacttttgtgttatcatcaaacaatttatgcatcatatcaataatatatcggtttccacaatactcaatgataaaaagatgcatggccgtatccaggcgaaaggcattttgaatgtcaggaaaatcccgggaaaaggtattgcggaaatgcaacagttcctctgtcggtaaatgaggggctgccatgccgagcgctaccggctcgatctcaatcctggcctgaaaaatctgcaggacatcactgagctgaatatctgacacgaaaatcccctttttaggcatgacctttacaagcccttccgattcaagtcggttgatggcttcacggacaggcgtacggcttaaaccaaggtccgttgccagctgactttcatttatgaaagaaccgggctcataaatacagttgatcaaacgctcttttattatctgataggcatgattttttaaatcacgatttccggtttttggcataagtaaccccttcttttctcaaaatatggttttaaaataagaaacaataagtatacaacatgattattataagacgatttctactattatacaagattgaaaatcaccataaaaagaggatttgtgaaaagttcccacatcgccagggatatatttaggtgaaaatgcataaaaatatatttaaaatctgagcaaatatgctattgaaatactaaaaatcatgttgtatactttaggcatgcaataagaatatattatgcttatcaaaaacgggaggagatacaatggtcagaaaaaaagaggaagttccatatgaaagcaaaccggctcctttccatggggtaggggagataacagtgcgttccctgttaaatggagaggaggatatgtatggtaaagggaggatttttgcacatactactgttaatcagggggcaggaatcggctatcatatccacgaaaatgaatctgaaacatactatattttaagtggagtcggtaaatttaatgataacggtgtcatccggaccgtaacagcggggaatgttacgtttaccggagccggagaaggacacgcaatagaaaatgcgggcgatgttccccttgagatgatagctttgattttataccaatagccggaatgaagaactgcataaaaacaggcagccagctattggtgaaggaataaaagacataataaaaggataaaaaggaaaggaagagacattatgaaacaattacagttaaaaaaggttatgggagttacgatgtcacttgttttagccatgtcattgacagcctgcggtacttcgtcagacaacaagaatgattcaactggagcttcagctgcggcacagacagaggcagtggcgcaaacagcttattcaggggcagcggccagcacagaaacagttacgctccgcctgggccatacacagtctaccgagcatctgctcaacacttctgcggagaactttgccgcgttggtggaagaacgatccggaggcgcaatccatattgacgtatatcccagcgagacacttggaactaatacagaacttgcagaagcctgctcagagggagatgtggatttatatatttctgccacgggccagtatacgtcacgttatacaccatttactattgtagaagccttttacatgttcagggatttggatcacatgatgaaattttacgaaagtgattcccatcagactttagttgacggtctggcagaggcatgtaacgtaaatattcttgcagatctgtattatggggcccgccagatgaccacttcgggaaaggcgctgaaaaccgccgatgacctggccggattaaagatgcgcgcggccaatgaaccccttccaattgctgcatttacccagctgggtgcttctcctacgccaattgcgtacaacgagacctatttggcgcttcagcagcacactgtggacggacaggagaatcctcctgcttccatttctgcaatgaagttctatgaggttcaggattatcttaacctgacctatcaccagtttcagatgctgagtattttcatgagcgatacggctatgcagaagctgagtcaggagcagattgatattatgtatgactgcgccaaggaagttgccaaggagcataataccaaggcgatcgagcaggaacaggaatatattgaagagattggaaaatactgtgaaatcgtagaacctgatattgaatccttccgtgaaaagattgcgcctatgtacgaccagtttaaagatcagtgggttgacggcatgtatgaggcgattcaggcaatgtaagctctgccggagaaagccggccttgtctggctttcaatttcacaaaaaaaggagtgcggtatggtaaagaagttagaaagcatagtttatcatgttcagaggacgttttttatagctgtgatgacattcatgctgttagtgctgtccctgcatgtgatcatgcgctttgcgttcaataatccaatcatctggacagatgaggtaattactatgatgcagggcacgctggcttttgcggggattggctattgttttcataagaagcagcatacggaattatccctggtctacgacaaggtcccgcgtcccgtgcaatggctgtttgatctggcatctaacggcatcatgctgttttgtacttgttacatgattaaatatagttggaaatttactcttaaaaaaaatattcagatgaatacgattccctggatgaaacaaagctggatctactgttttattacagtggggttcatactggcggcctgttacatcctgctgcgtctgcttgaggtattccgctgtataaacaaggaattgagagaaagggggtaatgggggatggcactgttatttttatgcttttttggatttatgatcatacgcatgcccgttgcctactgcatgctgtgcagctctattatctattccatggtgtatggggagagcctgaacatgatcgtttcccgagctgtacagggctccagcggctttacgctgctggccttgagtttctttatactggcaggtaatattatgaaccggggcggagtgacggatcggatttttaacttctgtaagaagactataggctggattcctggaggtctggggcatgccaatgtactggcgtctgtggtttttgcaggaatgtccggttcggcggtggctgatgccggaggcctgggagccatcgaaattaaagctatgaaggataatggctatgatgaggagtttgcagtggctattactggagcatcttcctgcattgggccgattattcctcctaccatatcgggtgtggtctactgtgtggccagtggcgtatctgtaggaaaaatgtttattgcgggtattttgccaggatgttgtctggcggttgtgcaaatgatatatgtgtatatagcggctaagaagcgggaatatccccgtacaccctttggaggattccgggatttgagcagatccttcgtcacatctttccctgcgctgctgacgccaattattattttgggagggatcataacaggtatctgtactcctacagaggcttcggtggtagctgtgttatacgcgcttctccagggctttttgacacgggatctgaagtggaaagatctgcccggaatcatggacgatactcttaccagcgctatgagcgtactctttattgtgagttgtgccaatgcatttggatacattattactgcacagcaaataccaggcaagctggcagccgtgttcctgagcgtagttacaaataaattcatcgcccttctggttattaatatttttttacttttggtgggaatggttatggagagccttgctgctcttgtgatcctggtaccgattttgatgccggtcattgcatcctttggtattgatccgctgcattttggaattgtctgcatcctgaatattacaataggtatgttgactccgcccgtaggtatggtgttgtttgctctgtcaaatgtgagcagtctttcatttgaaaggattacaaaggcaatgcttccgctgctggcagttaattttattgcgctgctgatagtgacctattgtcctccgcttaccacatggttacctaatttgattatgtaaaaagaataaaatatttattaaaggaaaggaagttgtgatatgataccgattgaacttgatcaggaaatacgggagggtgtttttaagacacttcctcagattatggatattcagaatgaggaactgcgaaacaagaccgcggatgcatggacgtatgcgttacagatcaacggccaatgtcatttagttaactttttgtaaaagaaagaatgtttttttaaaatagagatctgacgttccaaacggatagattgaagagaaggatatagggattatttatcagaagtagttttgtaaatattttaccgcaaggcaaacaagcagatttacatctgcttcaaaaaagggtattatagatattgatgaaactgttacttatgctgctcgatatataaaatatcgaggttttcggaagtgtgccgtttggagtcgtggatactgtcgatcattccgtatcggaatcagctcttttgtcagcagggacatcacatctatggagtctttctctgtgttcggacggagaaagactctacaaatatgagcagccatactgaaatttactttgtattcatatttcgtgtttcccttttctataattgcatgattgattagtgtttctgttatgttgtaagcgattaactttgcccaaatttcctgtttgatatattctggtttgtaggcatggaagttactcaatccgaccgtatatttcagcttacggaaagacccctcaatggcccatctggcatagtatagaagttttatttgttccgacgggaattcatctgaaggcagattagtgacgatgcattcataagaatcatccgatatcggaaaccgtacgattctaaaagataaatcgtaggtatccaaggaaccatatgcaacgtaatcaaacgatgcagccgcatccacaaagcgtttgtaataaccttctttaatcgatatcttctttttatgactgcgaaccagagttacatttacctgaatatcaaaggagtctgcatctggaaactcaaaatttccaacaagtcctttggaatggatatctttggtgcgaaataaaaaatactggcctttttccttcacatgtgccatgttgttgtaagaacaatagcccctgtcaccgataaaaacatcttttgtaccagtcagtaaatcgtggcggtcgaccatttcacagaaagcactaaattcatctttctgatggatcggctggatcagcgcatcggaataagtgtgcttctgtaagtcgtaaaaagcattcagatgcatactgtaaaagccctttattgaatgtccttcagagacatgatactcttctggggcgaaagcaggtttactgaaaaaggtaaaggtggagccatctgcagcaagaaagcggtagcgtagctttttttggtcataaaaagaagcaaaatggttaaaatgccgaaatacagcttccagggcatccgggctaagctttgcgcgttgctggttgagtgccgaagcagttggcgactgtggatccatgtcgaagaagtccagcaattcattttttgtgctggaggagccttgggaaacaaggaaagtgataagcttatcggcggggaacttcctgttccttgtcagatcggtgtccgaataggtaaattcggagattacggatgaaacaagatggacggaatgggaaaagcattgtttaattttttgatggaacattgtgtgtacctccttgaattagaatgaatttatgattctaatccaagggccgctctcgctacctattaaagtcaatcagtagcgagagcggccgcacattttgtggtgtatgtcaactgtttttatgaaaaaagggaaaaatatggttagacacccttcattaagaatctaaccataatattgcaaagcgttaactaaatgacattggatcaacggctttaaacatattgaggaaatgccaggctccggtatgcccgaggccagtgcgctgggagaccagagtatgcacatccgcgcggttggatacaatacgctaagtctgtatgaaaacctatccagggcttatgaaatggatttaggactggacaaagacatattaatagccagcgcactccttcacgatgtaggcaagccttatgaatataatcctgagaacagaaagcgctggggagaaaaccaaaagacaacaggagcccccaatgtgcgtcatccggcttatggaacttacatcgcaatcacctgtggactgcctgaagaagtggtgcatgtgtgcgcgaatcattcacctgaagggcgttttgtaacaagaagtgcttacgctacccttgttcactatgcggatgacggttcttggttttcattggcgagtctgtttgatttgaatattccaaagctatagaaaaaagtgttaaagagagggggctgtcccatctatgatttcctaatcattgatgcgacagcttcctcaaggtattgcataagattttattgcgcgctgattgtgtctatgatagacattttctggattgtttgaatcggtctatacacagccagagcaacagacagcagcatcaccaaaaggataattcccaactctgtccacggaatggtccaaatatctccccagtgggaacttatcatcatattaaagagaagcttgttgcagaacaaccccaatattgttccaattatactgccgctcaaggtgtaggtacacgcctcagaaacaatcatgttcccgagctgccttctacttagtccaatggcttgaaacacaccatactgccttgtccttgaggatacactcatggaaatgctgttgataatattgaaaattgtgattattgcgattaacactaaaaatccatagataaacagccacaggcaatagtaggttcccattgtgctttggctgctcatccgtttatcagaaaatgtataggaagttcctgccatttgctgaatggcatggacatcctcagccgttgcttcttttgtcaactgtatgtccaaaatagtatagtccatggctcctgtaatctgctgaaacgtacgctctgagcagatgattattcctgtatcattggcgttttaaaaaggggaagtagagagcataccggaaattttcatttcctgcgattgtccatttttatggattgttaccacatcgccaacctgtatcttgttttctggctcaaagacaatgaagccggttgattcttcgttttggacctcggcaatggatccgcttaacaaatattcttttgcccagccaaactgccgctgctcataggaaatcaaatccacctttgtctccatgccattcacagtaaccggaacatcgtatgcaaactttcggccataagcagctttgaccacggggctttcctgcaattcctctaataaatggcttcctacagaacaggaaaagtcagaactaataatagataaatccgcagtccagggacggagtggagttagggaatggttcataaattctacagtaacggagaaagacaaaaacaggataatactcaaggcaaaggagccggacattaaaatcagattttttttgctgccttttgcgtgatagatgccaagagcggtgtcgattttgaaccattttgtatttgccgcctttttagcggactgaaagctgtttgtaataccggaaacagccgccagaggtgacacttttgctgccttttttgcaggagaacccgccgccaataaaacagtcaaaaatccaatcaggactccggcaagaatactgggaatgctaaggccaaacacaggcatttccctaaagtattccggactgagtatccgcagcacagcacataagctccagattaccacaatgccgacaagaattcccagtggaaccgcaagccggcaccaaccaagagcctctttacggaccagcttcatgacctgtttcggagttgcgccgatacagcgcattaggccgaaaaattcaaatcgctgggccacatgacagtttaaactgctggcaatcatcataatgcctgcaagcagtactaatacaaacaggacaccggccgcggcataggtatagagcataaaggaactgtcactctgcccgtacattccaagcagcttggtattttctgaaacctgtttgtccaaaagaccgtaggcagcttttaattcagcgattgcctgccgcgccgtccaggggtttgtgaattgaatatacagcatcatgccgtaatcttccagcttatcactgtttacaccagtgaatagggcacggaaagcgtctgttgtgaggcagattccataagagtcctcgctcattgttttagaggcatctttacagaacccagaaatcgtataatgcagttggctgcccgcagacgtatctatggtaatttggtctccaagctgaaaccccagccgctttttggtgttctctgtgaccatggcctctgttatagtctgaggaaaatttccctctacgacattatttacctgcatatccgtaatccaggcttcatcgcttcccatcacaatggcgttttttccggataaaagatatccgtccttgccccggtaattaaggacaccataacgtgcggtactttttatatcagggcgcattgcaatcagtgctgcatcttccgcagtaaggttgcggatgccaatatggaagttcccgccgtctatttgagcctgtaaaatctggctgcgcacgaacatatcggccatgccgaatatggcagttaccaggaatacggataaaacgatgcaaaaaatagacatccgattttgcttccgatgaatttttgcggatataggaaccagatcatgataatgtttcattcatgctccctcccaaatccgtaagaatgccatccgatacctggaacacccggttcaccgatgctgtcaggtttttgttgtgagttatcatcaaaattgtctggtgatagagccgggccgcctgtagaagtaagtccatgacatcctggctgtttttgctgtccaaatttcccgttggttcatcagctaaaatcagcttgggtctggtaattaaggcccgtccaatcgcaacgcgctgctgttggccaccggaaagctggttcggcagatggtagcggcgctctgtcaagccaagcaagtccaaaagattactaatgacggcggaatcaggcttgcggtaatccagaaggagcgggaacatgatattttgctctacatttaactctgagacgagctgaaaggactggaatataaatccgatattgcgccgccgaaaaatcgtgcgctgttcctctttcatggaaaacaaatcttgtccgtccactaaaatatgaccagaagatggagcgtccaatgctccgatacagttcagcaaggtactcttgccagagccggattctcctaatacagcggcaaactcgcccttttccaacgaaaaagacacattttttagggcatctactttcgcttcaccttttccgtatgtcttgcacaaatcatgcacgttcagaatttccatggtatcaatacctcctttcccttaaggatagcagggatagcttacaatgaggtgaatttgaccttacatttccgtaagaaaggagagggtaaaggtcgtgccctggtataattcactttttgcagagatgatgccgccttgcccttcaataattgacttggcgaggggaagccccagtccaatcccctgtgtatccagtgaatgtttactacggtaaaaacgcttaaaaatatggtgtatatcctctggtgcaataccatcgccattgtcggaaataaaaatccgaagcataaccggagtgcgctcccatgtaatttcaattgttccacctggttgcgtgtgctccatcgcatttttaacaagattcccgatggcttctcccgtccattccatatcacagaccagcgtttggctgctgtcaccggccagcacaattttcttgtcttcatttctggccctggtggtcaggtcattgatggagtgtgcaatcagctttgatacaacacaagcattcttttcaaatataatcgttcctgtatctaaacgggttattttgagcatggattgtatcaactgctccatgcgttttaaagatacccccatcttagcaacaaactgtctcactgtatcggtattttccggttctgcttcaatgatttcctggtacagggcaagagcggacagaggtgtttttaattggtgtgatatatcggatatagtgcccttcaaaaactcctttgtttgatgctctgtttcactcttggactgtaacatcgtggcaagctgttccactgaagaaaaaatctggaaaattgtgccttcgtgattttgcggcaaatggcaggagtaatccccattgatatagttggtcaacacctgctctgctcgcagatacaggttcttccttttccaaaagaaaatgaatgtcccaacagcgagcatcagtataaaaaaaacaacagccgccaaaatggaaccaaacatatccttttgcaggcggctgacaaaaggtgacatacgattttgaaccggattgtccataccaacagagaccagcaggctccgtccagcctcgctgatttctgaattattgagtgcaacagcaatcacaccccgggatacgccctgttctaaaagggaagatgccattgcttcatcatgcgtaagatacaatgattttacatgatgaatctggctcatgcccaaagaaaatcctgcgataagaagtaatagagagtatatgattaagaaagaacaaaagcctttaatctgtttatcgcggtaaaagctcatatagatacctctttccattggtagccgaatccacgaaccgttattaaatgctctgggtgggagggctctgtttccaccttttcacggagccgccgcacatacactgacagggtattgtcatctacaaagtttcctgtggcatcccacaactcgttaagaataacttctctggcaacaatgcggttcgcattccgaatcattagacaaagcagacgatattcagcgcttgttaaatcaaggttttttccttttaaggatacacggctgcccaaaagatcaatcgaaatgtctccgcaggcgatagtagaaccgttctctccgtcagatactctggctctgcgtagcagggcgcgaatacgggaacatagctcccctaatttaaaaggttttgtgacataatcatctccgccgctgtccagtccgcggatgatactgacttcttcatcggatgcggttaaaaagataattggtatctgctgattttcttttctcactttttcacagacatcaaatcctgttccgtctgggagcgttacatccaaaatgagcaggtcgtattggtttaactcatattggaatgcttcacgcacagtacgggcgacttcaatatcaaatccattctttttcaaagagtagactaaaccatcaatcagacttacatcatcttccagcaaaagtattttattcatgcttttgctcctttccttgctttgtcctgccgtcaaccggctttttggcctctttgggtattaaccagattgtcgctattttcatggcaccgggaatacggcctgcggcacagtaataatttatccatctcggggtaacaccccatttttcgcctgcttctttcaatgtcatataatccatagtatacctccacaaattgcattataattattttgttcgaataaaacaagattatcagattgtaaatcaatatacccaatctgtaaaggcgcctctaaggaaccattcttgttgaaagccggggtgaaaaaggaaaattttataaccccaatcatagttttaagagagtcgtttgcaagttagcggaggaacctttcaacttcgccctggatactgtcctggaggaagacacagaggaaaagatcgcattgacccaggagcaggaggacagtcttctttctttcgctgctggcaatccggtctattggaagtatcgtgacgagatcattatttttctgggaaccggcctacgtgtctccgaattttgcggactgacggtcaatcttgattttgtcaaccggcagatcaatgtggattatcagcttctccgggacagcgagactggttacgcatacgcaacatacgcttctgcaaaggctgaaatggataggctcgcagcttagtagtaaagcccaattctactacctttttacgattgttgattgcaaaatgaggcttggaaatgccgagttatgccgtgtatcttccataatgaaaactgacggaaaagcccgtgattccaggccaaaccgacatttgccaactaatgcaaagataatcagaaatttgctataatttttatgctatatgccatttagtttccaatccggtgaaggatggtgcaaatgaagaaaacggaagatttaattaccccgttctacatggggtatccaagagaagccgtggtggaattattactccccgcatttttacccatcaacttaatcaaaggtggtcttaatgcaggaatcaccatgcttttatacaaaccgattgtgcccccctatattattgtatgtttcaggtgatactataaaaaggtaatgggaacatatcagcagcttttcctgtttacgggcaaattggtcactgagttgtaatacttttctgatataatagatataaaaagtcaaggtggaaaaaaagatgactgaattatattatgccgaagatgatccgaacatcgctatgattgtaaaagaatatttagaacatagaaatttcaaggtaacaatatgcggaacacttgcaggaatgaaacaggctttaaaaaaacatgtgccggccattattctgttagattggaacatgccggatggacatggagacagtttatgcaaatggattcgcagcaactggaaagaacttcccatcattttccttaccgtacgaggggattcccatgacattgtatcaggctttcaaaacggtgcggatgattatgtggtaaaaccgtttgaattggaagtattgtactcaagaattttggccttacttcggagaactcattatgcggcagaaccgtatctctcctgtgatgggattttaattgaccagaaccgcagaaccgtctcctgtcagttggaggaaatctgtttgagcgcggcagaataccaactgcttctgtatttgatgcagaataaaggccggactgtaaccagggaaaaaattttagagcaggtatgggatgtgaatggaaactatgtgaataataacactcttacagtcacaatgaagcgtctgcgggataaattacatcagccttcctgtttaaaaacagtcagaagcgtgggatacagcatggaggatacgatatgagcaggcagaaaaacatattggccacaataggacttgtactgtctgtcagtctcataacttcggcgctttctgttatgatgatatctaactatgacagccggcttcaatttagattgctgaatgctgtttgtggggaagtgttagagcaggagccagaaacagaaagcatcatttcagccgcattaaaggaatatacaagcaaaaatgcagatagtgcagcgaaggataatgttttatctgtgttaggttaccaggtttctgatttttccaatttgacgtataggaaacaggttttatttgtgacggcagggggattgattggtttcttgcttttaatgatcaccttattttatcgaaatcaaagggaatgcatgcgtattcgggctttggcagaatatctggaacaggcgaatataggaaaagccgctatcctttcttctaccggtgaggacgatttttcaaaattagaggatgaaatctataagactgtgacatatctctatcaaacaaaagaaacagctgtgcaggtgaaaaataagtttgcggaaaatctatccaatattgcacatcaaataaaaacaccgattactgcaatttccttatctgtgcagacaatgcaaaaagaaataaggaaagatcagttggctcaaatacaaaagcagcttctccgtcttagtcatttggaggaagccctgcttgttatatcccgccttgatgcagggacgctggttcttgaaaaggaggttgttgatgtttttactgtacttgtccttgcagcagataatttacaggaactattgacagaaacaggaactgctgttgatattccggaactgggcgagatggcagttactgccgatttggactggacaatggaggctgttataaatttgatgaaaaattgtatggaacataatccaggcggagttgttcactgcgcgtatgaacagaattctctctacactgatatcatgatttgggatgagggggacggttttctaaaggaggatatgccccatctttttgagcggttttatcgtggccataatgctcatgagggaggcattggaattgggcttgcactggcaaaagaaattattgaacgtcagaacggtacgttacgggccagtaacaggcaaggcgccggagcctgttttgaaattcgtttttacagtcactaagttgtaattttcatttgctataatgaaaatataaaattccaaaacattatagcaggaggtaagaagcaaatgaacattctaacatgcgaaggggtccgtaaggtgtacggttccggcgataatcaggtggctgcactggatgggattgatttgacagtcaacaaaggggaatttgtagccattgttggagcgtccggttccggtaagtctacgctattacatatcctgggcagtgtagacaaacccacaagcggaacagtaaccatagatgggacagacctttctaaactaaatcgtacacaggctgctattttccgccgcagaaaggttggacttgtatatcagttctataacctgattcccacgcttaccgtgcggaaaaatattcttatgcctcttacactggataaaaagaaaccaagcaaagagtactttgaacaggtggtccgttcccttggcatttttgacaggcttgaggcgttaccaagtcagctgtcaggagggcaacagcaaagagttgcgattgcacgctctctgatttatcggccggcgctgcttttggcagacgaaccaactggaaacctggaccagaaaaattccaaagaaatcatagatatgctgaaactatccaatcggaatctggagcagaccattctgctaattacccatgacgaaaaggtggctttggaagcagaccgcattataaccatcgaagatggaacaatcaaatgcgatgtacggcggaggtgaggaatatgtggagagattattcagccggatatattaaaaataatcgttcctcgggactctccattatgatagcagcgtttatatctgctttgctgttatccctattgtgcggtttattctataacgcatggaagtatgaagtggaaagaatcaaactgacccaaggcagctggcaaagccggcttgttggaacgtttgatttacaggacatggaagccataagaaactttgcagatgtaaaaagtgttgtggtcaatgatgaggcagcggacggtcacgaaacggtactggacatctattttgatgattacggtacggttttggaggacacaccacggattgctgaaatggcaggagttttaccggaagcagttacttataactatgaacttcttgcaatgtatctcatacgcagtccgcaggacatggccccaagactgctgtttcctatgttcattataataatgataatgacctctttctccctgattgtcattatacacaattcatttgctgtatccatgaatgcgaggattcatcagtttggcattttttccagcattggagccacaccgaaacagattcggacatgtctgctgcaggaggcagccgtactttgcaccatgccaatcatacttgggaatctgttgggggttgcaatcagtatggggcttttacaaatgataaatgcgctgttgggaagccgggtagcaggcaggcatgaggcagtatttggatatcatccgctggtcctggctctgacgctgttagtgacaattatcaccatatggatttccgcatggctgcccgcccgaacattaagcaaattggcgccattggaagccattaagaatacaggagaatttcaactcaaacgaagaaggaattctcctgtcctttctcttttatttggcgtagagggggagttggcaggaaatgccttaaaggcgcagagaaaagccctgcggacggcctccttatctctgatactttcattcatggcttttacggttatggagtgcttttttaccatatcaggaatcaatacaagagaaacctatttcgataaatatcaggatgtttgggatattatgattaccataaaggatacagatgtagattcttttacagaaactgaaaagatacaagcccttcccggcgtaagaagcgccacagtatatcaaaaggcgatggcaagcacaaccatcacagaagatgaaatgagtgatgaaatgaagtcctttggagacttttctcatgcttcgggtgacgaggcagtgcagacagcagcaggctggaaggtcagtgctcctatgattatattagatgatagcagctttactgcttactgtgaacaaattggtattacaccccggctggatggaactgtcatacgtaatcaaattcgagatgtgaccaacccggattttagacaccctcagtatatgccctatgttaaaggggaaagtgcggccagtctgataagacattcgggtgaagaagggacagcagttgaaatacctgttttgtcctatacagatcaggttcctgctttaagagaagaatatgcaacgattaattattatgaactggtgcatttccttccggtgtccttgtggaatgaaatcaaaggacaaattgcaggcagtgaggatgattcctacatttgcgttcttggaaatgaaaacgccgccttagaagaactaaacgttttacaggcggaaattgaccagatgataactgggtcttatgcggctgaaagtgaaaaccgtattcagaaaaaagaagcaaacgacaggcagatacagggaatgatggcgattttcggcggcttttgtgtactgcttgcaatcattggtattggaaatgtgttttctaataccttgggatttgtacgtcaaagaaaaagagaattttccagatatatgtcggttggattgacgccggaagaaattaaaaagatgttctgcattgaagcgctggttatcgcagggcgcccggttatccttacgattccgcttgcagggattacagctgggtatatgttaaaaataagttatcttgagttggaaacatttcttgcggaggcaccattggttccaatcgctatattcatgctggctattttgggtgctgtggcattggcgtattatcttggctggcggaatgtgtgcacgatcaatctggctgaagcattgcgggatgatacaatgatgtaacgcgctgtggtcagaatcacagattaaattccaattgccttattatacaatatttcagatcagaagtataaactcggcctttatcttatatttgcaaggtcggaaaattggcagaaaagaagtaattttcacattctcgtaattatggtaaaatggaagaaacggaatcatgcaaattggatttttatggaggaaacaatgccaagagaaatcaatccaaaagatacaaaacgagccatggcatatgagctatggataaaagcgcctaatccgatggtgacattttttaagacactggacgtaacgaaccttattaaagttagtaaaaaacgacagttgaagtttaatatgctgcttgattattgtattggaaaagcggctgtgaacgtggaagagttctatattctgccggtgggagataagctgctgcaatatgatacaattgcggtcaacacaattgtaaaaaacaaagatggagaagtcagttcctgtgatattctgtatacagaagatttagatgcgtataatcagcagtatctgaattataccgcgcaggttgctgaaagctgccaggacagagacctgtcgaacgacagtatggtaattggtacttcggctatcatagatgcagaaattgatggggctgtcgggatgaacagtggtattttcaataatccatttatcatatggggcagataccaaaagaaactatttagatattatctgaccatatcctttcaattccatcatacccaaatggatggcgcacatgcaggtagatttttagctaatctgcaaaatgaggttaatagattaaaatagacgccccctagtgagggaagggaggacagtacttcatctgcgggcgggcgcaggcgtcgccatcgtcaagggcggtacagttcccaccctcgcagctgcagcacgcccggcgtatcagggcattggcccgttttctctgcatcgggggcatatggtaggggagccgaccaagattgtgctatcctaacaaaggataagttgtatgcgtcttttgcggagaaatacgatttttcagaaaggaaataaaatgatggatttttgcagaatagagctggatgatattgctcaaataaattacaatgaatctaaaaatgcagattttctaaaaacactttttctttcgcatagatacgtatatgtcagaaacgaaagccatcgtttattaggaatcataacacccacaagttttcaaaatcatttcagcgttggcaaacatgtaaactattcatttcgctatgtaatagattgtgagcgggggagtgagggggggggggggtattgaaactgcagcagagataattaaggaaacacgatgtcaagaggttcctgtgctttcaaaatatggggaattattatatgttcttagaaaatcaaagaacctcattaactcctttgattttgattggaatttgtgtgatatccgcttcactctggaatatttagagggttttaataatgtgttgtactttcgcgaaaaccagagcattattggattgaaaaatcatatatcgggttttacaaaaatcaaaaaaatggataagatagaagatgtgcaggaaaatgatttgttaatccatgagggttacatgcatttggataatttcgctaattgcaccataggagaaatatatctctcagctatagcacgaacagcaataaaatgcctgatgtcaaacggcgttgattacttcttctttcaaacacctgtttccaataaattaaaggacgaaaataaaatgttttgtcgatatcctagtcttttgagtgaagaggaactcctctcaatataccaagaagatagagcggatgtggcttattggacttctggagatttccataacgtagatttttgcaaaacagatgaaggacgttatctgcctgcaaatgtcaatagtaaaacatacaatgtattcaataacgagagaatgactttctatcaaccagattcatatgaccacacaatattcgttattgggacttgtattgctcgtggatttggggtgagtgataggatgacaataccaagtatattgcaagagaaactgataaaaaacagttataaatatattgtccgtaatttgggaacaggcggcggactaaatatctattcggatatccgggatttcgtaaacattctaaaatctgatttaaaagcaggagatgtggtattacatttgggttataattgctgggaaaaatcaaaagaggaatttgagaattattttgaattatcagagttatttaatagaaaacatagccaaaggtgtttcttaaacgatgcgcctcatcttacgccttattccaatcgtgtgattacagattacatatttgaaaatattaaagataaacttggagtaagctaatagccagattccgtaacgatccgtggcggcacgcttctatacatatgcctgcgccctgtggggctgcaggccggacacgagaacccgcctcagtataccctcagccgtaatatacagtattcccggctgagggtatctttttaacaggccgagactcaagaaaataatccacagtccgcctgttatgtgttcgtaaaaggttatgcagcagagtagattctgacctccgcttctgcgctccagagaggcttcaggctgacaaatacatcgttctggaacaattcactggaaagataagcctgggcatgttccacactgtcaaaaccgtgtaaaacctgtcatcgttgattttcatggtgatttcgagataagcactaattttcatttggttttcctcctgttttttggttatatgagattgttgtgatttgattatagatgatagaatttcagatgggaacaggtccgtaaatttataagtaactaataattttcatagtaacttgaaaattcatggtacattttctataatgaacgcaatgaatttatctatagaaaaacagactttttggggtgatggaaatgtataagccaaagttgaaaaaggacattcgctgtcctctggaatatggtcttgatgtatttggaggaaaatggaagccgcggattatctgcgttctaacggagaaggggcgtctgcgttacagcgaactgcgcagggaaatgacagacattacagacgctgttctggcagccgccttaaaggaactgatgaacgatgatatcatacatcgcaggcagtatgacgaaattcctccccgtgtggagtactgtctgacggaaaaggggaattgcgtggttccaatcctgcagagcatctgccgctggtccggagcctatcacaaggaggattgtgagaatgctctgtcccaatgccagaagtgtgattatcacgccggtttctgatggcgcgttctgtctaagtgacggacagcatattgtaaagcttcagaagacggacgtcatctttggatacctttaacagccggactaagtccgcggcgactcctgaagcttgtgactttagtcatgagaggttcactgaaacagatagtataataaaatgaaaaaaagtttatacgtttgccaattgcgtggaaaaaactcaagaaacagaggtgttccttcagaaagaggactagctggaaatagcccgcagtcattatcaccaaatcactgccttacatgagggacattcatttctatgtacgcagagtgtttgaccgcagacagggcagcgaaacgcctcttcctgctgctgtaaaaagaactgcatgccctggtcccggattgtggcgaggttttcaatcatgctcatatggtattttgaacgataccgcttgtccaaatcctttaaaccggcagttcatgccgcatggagctatccattcagctttcattttctctcctcctcataatggtatttgggaacaagtggtcccctgacggattggctgcttttctgttattgtatcacatgtagcagtctcttggaaagcgtattctgccgccgtttaaaatgcgccgttttaaaatgagaatttcccgccgtttaaaatataaagcaaaagccagagataaatccggtgatgccggacagcaagtaaaatcaagtatcagacttccggttcctgtataatgagcatagagtggttgaaacgagttcaaatttttgtatatcaaaaaccgcgaaagcaacggatattgggatttctggcagaaacaaaatctcattcccggacaggactatgagacaatcggcggcttactggacagcattaagggaaaactggacgacaacggggaggctgtaaggccttttacgcggtgagagggagctatgttgcctgctgctgacatgcagggtctgtaatttccccgccggcccctctcatcactatataatttgccagcgcgtcaataaatgccccgttgcggggtttctggctaagttcaaaattaaagatttcgtttagcagttttctgtccctgtgtaaccaaatcgtattgataagggtgcggatattccgctccacacagccgatagaggtctggtaatggaccgctatatccacatataaccccttggatatatacgcaagcaaagtggggtcatgggcagttcgggtgacgccgtagattgtgtaacgaaaccctatataggagttgtttacaccgaggcgccgaagcaggttactgatttctctttcgtagttcatgttaatccctccttggtttttgttacctatgttacgttatacgcagaggagtggattgacaagggagaacggacgacaaaattgatataaataagtcgaaaaatgcgaatatcctggcggcaccatcctattttgcaggaacagttgggccggcccgccttttcagcctttcagagacaggatgtgattcggcacgccctgtgtatacattaccgccggtcacggttcccagtgatttgaattcatccgtcgttttatggaccatttccagaatatcttctgcccgttttctgagcagtatcccttcatcggtcaattttatgctgtagttgccgcgcacaaataattttctgcccagttcccgctctaaatcctttagctgttttgacagtgtgggctgggagatatgcagataagcagcagcttttgttatgttttcctccctggccgccgcgcggggaaaggtgccggagactgttaggaaacattatgaactgctgggacattatgggggagaatgtatccggtgcggctcatgcgggacaagatgttcctttggcgtaccaatcatggaaaacatgaaacgggcggaagcggttttcggcaaataggatacggctttgaaaattatctgcggcagagacgccgttaccaagatgtacattagattttattgtttcaaaggcagtaactatttcacgatgaaaatacagccgcggcatccttcctcatgccatgaaaaataaccccccagttttttgatgaataaatatatggcaacttgttaactggactggaaacggaggaatttatggaaaaggaaatgctgctgacgaaatttgaaacttatttgcgtactgaggaaaaatcagaatcaaccataagcaaatatcttcatgatgtgggggagatgctggattttatgggacaggcggggctcagcaaagatttgctgatgcagtaccgggggcatctcagccgtcaatgcagggcccggaccgtggatgagggaattcatactgcgtaacagagacgattgcacacaggaggagtggaaggaggcgtgtatctatctgacagggcacaaggcattcactgaggacgaggcaatcaggacaatcctgcagcactggacggatgggaaataccggccggaaacgagtcaccggccggaattgctccgccggacagatagacaggataaaagataacaggagagggccatgggagaaatagaataatttataatcatggaggatgatattccccgcgacggagggcgttgccctgaatatacatatacatttctgattggcctccagtcttttgcaggcaggattgccaggggatatgtaaaatcctttcatgtggaggaattactgcttttccaggggcttgatcagatgattttcattatggaagatataatggacgcagtgggcgcccccatgagagggcggccccccgaagtctggacggaaaatcccgtaaagagacagcggctgtcccctttatggatttgagagagaagataaggaaggagtatgacttcgagcgggagaaattgagagaatttccggtttatcccacggtctctgtccgggttgtgggacgccagtgtgaatttgagtttataaaaaattcttttccaactcatttccataatgtttagccagctgaatgaagtaacgatgcacttcattcagatgcatgtcttttctgtatgcaacatagatattccagttagggcgggaggacaggtgaaaccaggcgcagttagtactgtacggacttaccagaacccgtgactggggaaggattgtgcagcagaatccgttgcttaccagctgtatcagggcatggttcatggcagactcaatcagaatatgaggctggtagcctgcttccttaaacagggggtcaatcaccttgcgcatggtagatgaagcgaaaatcagggagaagctgtcctgcctgaaaaggcgcaggtcaatggtggacaacggttctccgggagcggaggcgtatttggccattggatggtttttgggaattcccagcaccagattctcattatagagtttaatatattccaggtctatcttatctgaatcagccagcataatgattccaaagtccagatgccctcccagaagaaaattatgctggtcagacactattctctctaaaagattaaaggtaactcccgggtatctgtggttaaaatccggaaaaaccgaggtaaaaatatcaattccatgctcatgggtgagccccagggcaatttctcctaccacattgccctttaaatcctccagctgcgcatatgtatttttcttaatgcgcaggatctccttagcgctgtcaatatataattttccggcctgtgttgttcgcagataatgcttattccggtaaaagagctgctgacccagctctttttccagtttaatcagctgctggttcagtccggactgtgttatgaataatgtttctgctgcccttgatatattcccgcattctgcgattgcgaccatgtattccaactgcttcaaatccataaaaaatcccccttgtccaagctgtacaaagatggatggaaaatcaccatccattcccggtggtaagtgcgcaaagcgacgaagttgttagaagtaaaattacttataaatgtaattattagtaactttacttctgattatactacagatataataaaaacacagcaagaaaatgcattaaattaaaaaagatgaacaaaaggagaggggaagatgaaaagtattaaatggctggataagaattttgaattaataatactggcaatatttctggtaatcatgagtctgctgtcattttcaaatgtaatcatgcgttactgtttccaccatgcactcagctggtcggacgaggtttgctgctactgtctggcgctgtcggcgtttttctgtctcccatgtgctgtgcgtatggggacaagtattaaggtagacacatttgcgtctattcttccaaaacatgtacagagtgtgctggagattgcctgcgatgtggtgatgattggatttctgggatgttttttgaaaggaacagtgactattatccagaatgcggcaaagattaaacaggccagcccggcgctgcagattcctttgtcatatctctatggaatcatgggatttgcggttgcattggcaatattccggtatatacaggtcattattaaatgtattgtctgcagacagaaaagcaaggaggtaatggaataatggctattggtgtatttttcatcctgctgtcagttcttctgatcgccgccatgccggtgggaggtgtttttggaatcatgtccatacttccgagcatcatcaatccgtcctttccatatggcgcggcggatgtggcacgaagcatgtttgccggtatgaacagctttacgctgctggcagttcccctgtttatggtatcaggcatgattatggcagaggggggactgtcggaacggctctttaatttctttgcgtattttatcggcaataagacagccggttttccatgtgccgttatcgttacctgtatgttttacgcggctatttcaggctcatctccggccactgtatcggcagtgggagcaatgaccatcccgtttcttgtaagcatgggatatgagaaaattttcgctgcatccattgtgacggttgcaggagggctgggggttattattcctccaagcatttcctatattgtttattcggcggcagcaaacgcatcgccctctaaactgtttaccgcgggaatcattccggggattctgatcggattcagtttgatggtttacagttattattactgcaggaagcacggggaagataaggaaaagcttctgacaaattataatgaaatacggcagagaggattttggccgcttttaagggacagcttttgggcgcttctgacaccggtcattattttgggaacgatttattcggggatgtgcagtcctacggaatccgctgtcatcagtgtgttttacggattgtttgtctgcatctgcatctataaatccataagtctgaggaatcttggaaatgtattcatgtcaggagcaaagacctatgtaaacatattgtttgtaattgcggctgccacctcctttgccagatgtcttaccatgctgcgttacccccagtccatcagccagtacgtacttgcggtatctgataataaaatcgtgattttattaatcatgaacctgattatgctggtatgcggcatgatcattgacaatatccccaatattatgattttgactcccatactggtgccgattgcaacggctgtcggggttgaccccattcatttcggcattattatgacgtgtaacctggcggttggcatggtgacacctcccatgggtatcaacctgtttgtggcgtcaggcatgactaagataccaatgctgaaattggcaaaagcaactgttccatttttaattgcatttgtaatctccctgcttgtaatagtatttgtccctcagatatccatgttcctgcctggcctggctggttaggaacaaacacattttataaaaaggagaatagtgatgagaaaattagcggtaatggtggcagtgtctatggttatatccctagcgggatgcggttcctcagaaagtgatggaggaaaaggaagcagttcttccggaactccccagacagaaacgcaagtaaaagcacaggcagaagcacaggcagaggacgatggcccggcgcccaaaaccacaggagaatttccggaatatcactggacagcggccatgtcggtggctgaaaatactataaattacatgatggttgaaaaatttgctgaactcctggatgaacggtcagggggaaggattacggttgacatttaccccggagggcagctgggcaatacaaccgaatttacggaagcagttatcggcggttccattgacatcggtacaggcatgacgacagaccttgttgacttcataccttcctacgctgtttttgacatgccaaatctttttgccgatgtggaacagatgagagccgtgctgagcggtggccttgtaagtgctttggatgaatataataatcagggaggaattgagatgctgggcttttccgatgccggcttcagacagcttacctccaacaaaccagttcatcagctggctgatttatcaggccagaagattcgtgtcatgacgaatcagtatcacattgcgtattggaatgcccttggcgcagcggcaactcctatgcagtttacggaagtgtttatgggactttcgcagggaaccattgacggggaggagaatccttatatgaatatcgtgggcaacaatatgcaggaggtccagaagtatgtaattgagacaaatcatatcgggcatattattacatttttcatgaattacaatttatatcagggccttccggaagatgtaagggttcttgtggatgaatgtgctgaggaggcaacggcctatgcgaacagcaaggcagatgagagcatagcggaatataagaaaacatgtgaggacgccggatgtgagataattgtcctggacgacaaggtgatgggagagttaaaagaaaaagcatccgtggtttatgacatggtaagggaaaacacgggtgatgagcttgtggatcagctgctggcagcaatcaatgaagcggaataaggagtaaacaggtggaaacattattaatcagaagtggaaaagtatataatccggccaggcatgaatggagctataaggatattgcggttaagaatggaaggattatggaaggactcccgtcaggagactgtgaggtggtggatgcttctggttgtatcgtcacagcaggactgattgattaccatgttcattattttaaccatggtacagaaaacggtgtaaatccggacgcggcttcctttccatgcggaatcaccaccgttgtggacggaggaagctgcggcgctgccaattacgagatgtaccgcaggagcgtgatgtctttcagcgatgtgcgtattctgaacatgctccttatgggaagcgggggccagaccacgaatcagtatccggaacgcctggaggaacggtattttgaccgtgacaaaatacgcgcattgttcaggacatacccggacaacctggtaggcctgaaactgagactgtcagcggacatcatcggggagaatgaggcggagaaatccctgagagctacggttgcggttgcagaggaacttggctgtaatatatgcgtacatatcacggaccccgcgatggatttggagaagcttgcagggatgctgcgcaggaaagacgtgatatgtcatgtctatcagggaaagggcagagaaacgattctggatgagaacggagcggttcgaaaaggaatcatggatgccagggagaggggagtattatttgatgccagcaacggctgtaataattatgacctggagatctcccggaaggccgtgaaacagggatttataccggacattatcagttctgacatcaataccgctggtttttatctccagccccttcacagcctgccaaggataatgagcaaatatctggatatgggaatgtgcctggaaaaggtgctggatgcagcaaccgtctgcccggcacagctgattggaagggaagaactggcgtccctggacatgggcagtactgcggatgtggccattcttaagctggtagaaaaggaggtatgttacagcgaccggaatggacatacatttaccggacatcaggtcattgttccgcaaatgaccataaaaggcggcaaggtaatgtattgccaggctgattttacataaaacagaaggaagtaaagatgatgcccaaaatcaatgaactaccccgcagcaagctgcggggtatcgaaggttgcaacctctacatataatcccatatgctatactgctttgttttctctacgtttttatagattgttttataatttttttcctgtccctgttctttcacatatctacttatgatttgctcattcccatgttcactcaccgttgctacgtaatagccatctgtccagaattctcctccccacaattttttcttcacttgtggacatttcgcgaacacctcccgggctatgatgctcttcactatttggatgattttttttggactatatgcaggcactgactggataagaaaatgtacatggtctttatctgtacctacttccaaaaatcttatttcatacctttcctgaattccctcacacgtttctttgattaccctatctacagtattgtttcactcatcgcacaatttctcctttcctttttcctctagtatatctcttcctccatgtcttgaaaaagtttgttacgcagcaagctgcggggaattaaaccctctttttgattaaaatggaagtatatgtcattaccgccattgttgcattagccagggcggttgaaaatacggtcaagttccgcaatccgtttctttgcctctccaaccagcgccgcctgcgcttcatttccttttccatcgcttcatgggtattacggaaaatcttctgctgtgagcagtcgccggagagccggaagccgtaaacaccgttttgcagcattgcagcacacgcattaagcatttgttcaaatatcaagggcatttcaacaggggtgtatggtatgttacgcaataggggcgatttgccctgcatttatgcggtaaatcctaggtgatgtgttagtacaaatgcttccttatcactgtaaaaccaagtgttttgtcctgtcttttttcagaaaaccatggattctcaggacgctatatactataataaacaatcagaaggggaaaacaataatagtaaccaacaaaaggtaaccaacaaaaggaaaccaggagataccatatgccaaatataattgagataaccgattttgccgctccggagcttgatgtttacgcccggcttacagaggggcagctgctgaaccgccacgaaccggacaagggcatttttatagcggaaagtcccaaggtcatagagcgcgctctggacgcggggtgcgtacccatatccatgctgatggaaatgaagcatgtggaaagccaggccagggaaatcatcaggcgctgcggtgatattcctgtgtatgcagcagaatttgatgtgctgacacagctgaccggatttcatcttacgcgggggatgctgtgcgcaatgtaccgtccgcctatgcccgggcctgaggaaatctgtgcaggcgcgcggcggattgctgtgctggaacatgtcatgaatcccaccaatgtaggtgccatattccgttccgctgcagccctgaacatggatggagtcctgctgacatctgcctgcagcaatcctctgtaccgccgtgccatccgggtgagcatggggactgtattccagataccctggacgtttctggacagcgggttatcctggcctcaggagggaattggacgtttgcatgagctgggatttaagactgcggcaatggctttaaatgatgattctgtcagcattgatgatgcaggattgatgtcagaggaaaagctggccattatcctgggcacggaaggggacgggctggcagcagggaccattgctgactgcgattacacggtccgcattcccatgtcccatggcgtggattccttaaatgttgcagcagcaagcgcggttgccttttggcagctgggccgcaggtaaatgatacatacatagtaaaaggtgaagaattggttaactcccggaaaccgtcctgaatgcattggaggatggagaggacggatacaggctgcatccaccctttataatgtgctgctgtctgtcactggaattggaaaggcggttagttcagctgaggaatgacttgggaactcatggaaacagtttatatgagaaccggatgataaaaattaatatgaatcagggaggaaaacacgatgagtaaaacattagtagcatttttttccgccagcggcgtcactgctaagctggcaaagtcattggcacaggtaacaggtgctgatttgcacgaaatacagcccgcagagccgtattcatccgctgacctggactggacaaataagaagagtcgcagcagcgtggagatgaatgacccgtcctaccgaccggccattggcaatcaggtggcggatatggagcagtatgatacggtctttgtgggattccctaaaatggagtatggttttaattgtgtattgtgtgcatagcgtttgaaaatgttggaaaataggaactgtatgcacaaacgagaagaataagtgtattacgttggtatagatttactaagctggtaaaaaagatttctgaaccagttttttgtattatagggtgcgcccagctaagggcttgaaatttagtgggtgagagtcccacggtgtaaggtacaagctataccgcatcaagcgagtcttgggtggacagcagcgatgttgcctgctaagcgtagacagcgggattgcagggcatagccgtatatagcttcgatattaaaatgaaattgggaaggcagaagtgctcctatacactgaaagcaacacagctgtagtcgttaagagcgagaatgcagctgcttccccggggttttaaggctggtcatgtaatcaaggattttaagtcaactggggaggtctgccaggctccgggcaggttgcgtaagcccggtatacggaacaacggtagaaaggagaaccgtaaatggccggcagaagtcggatggccgaatagtacacagcaaaaaaaagcggtggaagtcgagagagacctgtcctcgcaggtcagccatgcaaagtcatatcaaagaggaaacataatctgtacgcagagacaggagaaattatggaaacgaaattggcgagaatatcacagttgtcaagcgaacatccggaaatggtatttacgtccatagggcatctgattaataaagagttactgaaagaatgccacaaggagatggatggaaagaaagcggtaggaattgatggaattaccaaagaggactacgaagtaaatttggaagaaaacttagatgaattaatcaggaaaatgaagaagaaggcatacaagcccaaaccggcaaaacgggtggaaataccaaaagaaaatggaaagacccgcccgctcagtatatcctgctatgaggataagttagtacaggaagcgctaaggcgaatactggaagcagtgttcgagccccatttctacgaagaaatgatgggattccgcccaggaaggaactgccacatggcattaaggagactgaatgggatgctggaaagggaaaagacgaattgggtgctggacgcagacattaaagggtttttcgaccatttagaccatgaatggatagtaaagttcatagaatcgcggataaaagacccgaccattatcagactggtaagacggatgctgaaagcgggaatcatgagagatttcagatatgaggagacagaagaaggggcaggccaaggctcggactgctccccggtcatagccaatatatatatgcactatgtgctgatatggtggttcagggagaaagtacagccagtgatgagaggatatgcggggctggtagtctatgcggatgattttgtgggatgcttccaatataaatcagatgcagaaatattttatgaacacttaaagcgcagaatgaagtactttggactagaattggaggaaagcaagacaaggttgattgaatttggccgattcgcagaaagtaaccggaaagaccggggaaaagggaggccggagacgttcacattcctgggattcacgcattactgttcgcatggcaggacgggaaagttcagagtaaagaggaaaaccagtaagaaaaagcttgcaaagaaaagcagggaaataaacgccatgataagagacatgaggtttctggagataaacaggatagtaaagaaactaaatgaagtactgactggttattatcattattacggaattactgacaattcaagaagcctgaactcattcaataatgtggtatggtttaggttattctactggctgaacagaagaagtcagagaaggagctatacgaaggaaggatataaggaactaatgagacagttcccgcttgtgcggccacgtatttatgtcagtatatacggataactgtagatgtattagctttgcagggagccggatgcgggaaagctgcatgtccggttctgagaggggtaagccctgtaaggggcttacctacttaccagatatccatccagtaagaaaatgatgtgtatgcgtattcaaagaagagagtatgaaagtttttctgtaaatagctattaagcattaggtcttctatgataaaatctattatcataaggaggcctattattatggcaagaagagaaaaacagcccgtacacaaagtagtacagcattgccaaaataataatgaatagacgttgcttttttattgtagtcggtgcataataattctatcactaaagaatggatgtgttattatgcgaaggaaaacaattgatactatcccggttttatctgatgccatgaaaaacatattatctgctttttcaaaaagccgctcccttccgtcaggactggtcaaaagagccagcattgtcctgcttgcgtcacagggggaactcaaccagaatattgcaccacaggtcgggcttcattataataatgttgccacctggcgcagtcggttcctcgcggcgctcccagccttgcggaggattgaaatggacgacccgaaaaagcttgaagatgagatacgggcagtcctgtccgataaaaaacgccccggtgccccgtctgtttttacgccggaccagatcatgcggatcatcgaccttgcctgcagcaacccaaatgattttgggtacgaagtaagccagtggagtctcccgctgttagtggcagaaattaaaaagcaggggatcgctgaacagatttctgagaaatctgtcagccgttttttaaaaatgaggtagatttacatccccacaaaatccgttactggcttcattcttcggaaaagacggaagccccggaatcttttgcgcggaaagtaaacgaaatctgcggcctgtaccagagtgcccaggaacaaagccgggaaggtgcacacattgtttccacggatgaaatgaccggggtacaagcgctggaacataaatatcctgacaagctcccattacccggccagtgcgccaaaatggagtttgagtatatccgccatggcacgaccagcctcatcgggttctttgatgttgcaacgggccgtatggaaatgccgtatttaaactccacacgcacagaagaggattttgtggaagccgtgaaagcattggtagggacagacccgcaagccccatggacatttatatgcgatggcctaaacacccataaatcggaagcccttgtccgctttgtggcagaagcctgtgcccttggcgtggaactgggcaaaaaagggaaaacagggatccttaaaagtatggaaagccgagcggatttcctgcatgacccttcccaccggatccgctttgtctatactccgaaacacagttcctggatgaaccagattgagatatggtttggcatcattaaccggaagctgctgaagcggaaaagctacctatcaatagaagaactggaagcaagcatcctgcgctttattgaacaatacaatcttacagcacacccatttaagtggacatatgccgggataccattagtaatttaatcactgatatttaagcaatgctgtagtagtcatgacggaggggaaaaggaacatcgtccatcagctcctggaagagtatgacatccagactgcggaggatatccaggaagccctcaaagacctgctggggagcaccctgaaggagatgatggaagcggagatggatgagcatctcggctatgggaggtcagaacggtcggattcggatgattaccgcaatggctacaagcccaagcggatcaacagcagcttcgggagcatggacatccaggtgccccaggacaggaagtccacgtttgaaccccaggtggtaagaaagcgccagaaggacatttccggcattgaccagaagatcatatccatgtatgcaaaaggcatgacaacccgccaaatctcggataccttgatggacatttatggttttgaggcttcggaagggttcatctcggacgtgacggacaagatactgccgcagattgaagactggcagaaccgcccgctggaggaagtctatcccgtggtctacatcgacgcaatccattattccgtgcgggaggacggggtaatccgcaagcttgccgcctatgtcatcctcggccttacgctggaaggtaaaaaggaagtcctgagcatacagatcggggagaatgaaagctccaagtactggctctgcgttctgaacgagttgaagaaccgcggtgtgaaggatatcctcattctctgctcggacgggctcacgggcattaaggaagccataacggcggcattcccgaagacggagcagcagcgctgcatcgtacatatggtacggaacacgctgaaatacgtctccgacaaggaccggaaagcatttgccacggacctgaaaaccatctaccatgccgcaaacgaggaaaaggcgctggaggcgctggagaaggtgacggaaaagtggacgccaaagtaccccaactcaatgaaacgctggcatgacaactgggatgtggtatcccccatcttcaagttttccatggaggtcaggaaggtgatctatactaccaacgcgatcgagagcctcaactctacctaccggaagctcaaccgccagcggagcgtgttcccgggcagcacggcgctcttaaaggctctgtacctggccacgttcgaggcgacgaagaagtggaccatgcccatccgcaactgggggcaggtctatggggaactgtccattatgtacgaaggcagactgccggaataagagcgcacaggcataggtgtacacctatccggaaaggagctttccatgtatggattttcaaaatacgatgctcaggacaggtacgacagctataatactgtacaggtgaagttaaaactgaatatgaagacagatgcagatatcctggcctgggtcagacagcacaaatatggcagggacacttccgtccaaggggccatcaaggccctgatacgggaagacatcgccagaggccaggccgatgggacacaaggttaatccctctgcattttacattcgttggctgtctgcagctctgacagggattccatgatagacaggtaatcgatcccctccacaacagtccctgtgccagggtcaaacagttcatcgtctgcggtggctttcgggtcataggatttcagttcactgtcataccagctatagatatcactgtataagtcggctgcatgatccagcagggactgcagtccattgatctttgccctgatatcttcaggtacaaagggatcgtctgtttttagcttcatggcacacctcctgatgttttcctgtaagaagtgtaccataatttgatgggattttccaatacatcttgacagaatccaaaagcatccgtatagtaaaggtaggtggtcacgacatccacctacctttctcattaacttatcatagaagatctcaatttacagactttttttcatactctctcaaagaaaggagctggtacgccgtttctccagtctctctcataaatttcaagcaaaaactgatatattttttcgcaatctgctaataaacgaaatggtctctgggtaataatcttcatacttttatgtgcatccaaagtctagacctctttcctattaggtaacgaatcggaaatttgttacaatataaataatgcctgttcgtaatttttaacataatactttatatttgtcctacccttttgaactatggtatgcccctctttttcaagcatttctttttgagcttccattccacccggatatttgggatttagttcgccattcgctttaagagttctccaataaggtgtttgattatctgttctttgataactcgcccatgccacgatcgatacaaatatccctgcagtaattggttctgtgaaatccgctccatttttctttgcgaagtaatctcttattgttcctattgtaagtaattttccaaaaggcacaagccgcattactttgtcataatcaataggtggagcgaaatacattctgtctccgccatatttttcgatgctctttacgtctgtaataatttggaattttggcatatccttgctgtcatgaagcattgcgttaaaatcttttttatcttcgtttgccatctttgccccctcgcttttttgctgcttaattccagagcatcaatacaattatttccgcatcagttccatagccgctgtactcagacaccatgagatatttttcatcagcaataatcccataacatctgtcactgtcttttttatgcagctgattcccgaaataaatcttgttatcatcccaaaactttacgatctggccgtttggaagggtatattcaatgttggcaaaggaacctttcagcgcattcagctctgttacttcttccatatccggaatctgcagcgcattaaacgccgcaatcagcttttctttcaattcgcttaacgctgttttgccttttttacagcactgtgcgacaaggcattctgctccaaaaggctgcccttctgttgctgcacacccgttacaagtgctgcttaattcacagttcgtacaatcaattccgcagatagatttcattctgttttccacctccataaagtctcttttttacagcttccttatgggaaaaaacatgtaccctttcccggtctttggacaggtaaaatcatggacggcgcccaccagagcaatactatgttcctgcagatattggattacttctgaaaaggtactatcattttcacgttccacataaatatactcatagccgggtatcacccattttgtccagccatccggagctttagcatcctcattacactccacccctgcaaggtaaagtcctttctgaaagccttcccagggctggaaggaacgggaaaagtcagacattgcaccccatattccgctgatgtttccatcttcatctttctttgccagatgcgctacttctccaaaatgggaatttgctttatcccataacttctgaataaagccggctccgtccgttgtcgccccttcttttccgattacaacaaaggactctttttcgcatgtttcgattttcattggtttgttgctcccttcgctttatgtttcatttcattttaaaggatctcgcttttttcagttttggatatatttatcatagcggcactgctcaatgactgtgtgccccagtaatgtaattgcccttgccggacaggaactgatgcaccggtaacacatggtacagtgttttccggcggacgcttttccatttttcagagtaaggttgtcggccgggcagagccgggcacaaagcccgcagcctgtacaggcattactgattttcaatcgatccgagtaacttttggttttgccatagtaccataaacgctggcagagtaatccggcgatttggttataaagatgcaggccgtttttgggatacctgcctttcctgatttcctctgcacatttctcaatctttctgtctgctttccggatgatttcccagttctcctgaaaggattttttcagcagctttacatcacagacagaatcaggcatacgaatatggaaaccgccaacgatttctgcaccatactttttgagcagccgtgccgagcagcctgcgccgtctccgctgaacaatcccatagtagcaacgcaaagtatttttttacccttccaaagatccggatggcttttgataaaatcttttaccatgacgggaacgtttgaaaactgaacaggatatgcgaaaatgataaaatcatgctgtgataataaatgtaccgcttctttcttctccataggaacagtctgtgcggattcatccagtaaacggacaagttttcggacacaatgttccgtgtttccggttccgcttaaataaacaccaatcatacaaaaagataccagtacacatcaaatttatcaatgcgtgtaaactggatacattcccctccttagtcatagtttttggatttgtcctttctggttattttaccgccattgaccgatttcgggaagacctgaaagcaaaacccttctcaaaatcggtctatgaaaaaacaagaaacaagttcattttttcttaagatgatttagaggttttttagagactactctgatagaatggataaaaaattcgcagaaatactggataaactgtggatttatattttattagagaggagaacaacatgaaaaagaaaacaaggaaaatggtcttattgacaggagtattgtgcatgttgagccttgccgtgtgcgcctgtggaaagacggaggaaccgcaggatgcagcggaaccgcaggtggttcagggagaaccgatcccggaggatgatacaaaagaagaggattctactccggaaccgtccgcagaaacagagggcacaggaggcgaagacaagcaggaaagtccgggggcagaaacggtgccggaatccggggaaaatagtaatcggggaacagacagtacacagaaagaacagccggaagcacagccggaggcgaaaagtacatccggcacatcggcacagtgggatgacagcacgccgaatctggagggaagtgccaaagacctgaaagacgggcagttgaccgtggttgaatctattatagaaaaagcagataacggaggggacatcatggtagggcctggaagcggggatgattcggagtttaacaaggttaccgttacatatgatgaaaacacgctgtttggcatacagacaatttatgatggaggggccagatttgaaatgtcagaagcgacagcggcagacctggcagccggacagcacatccaggtatgggggagttcttcaggcagcggtctgaaagcaaccgagatctgtattgtaaaagtggagtaaattatttctgtcctcttttggaaggatgataccttatcaggagagggcggttttctttctataaacattcaggaagcctccatttctttcacaaaaaacgggtatgtctgaaaaaatattctgaaaaggtcacctttcgcatctccagtgcgtgtcataagtataacagcatccaaccgaagaatacccggcgggtttgacgtctgttgtcatccagttttccccgacttgcgaacggtaacgggaatttttccaggtccggggtattgtgacagatggatgcaaagcaggaaaggagatggaaagatatggacctggaagcggcagtaaaacaatacagcaggatgctgtaccggatctgcattgtgatacttggcagtgaggaggacacccaggatgccgttcaggataccttctgcaaatacctggagaaaaaaccgaaatttgcagacacagaacacgagaaggcatggctgattaaagtggccaccaatcactgccgggatatacagagattccggttccggcaccccagggtgcccatcgaagaacttgccggtacgctggtatcccagcaggaagaccgggaagccatccgggagcttctccacatgcccccaaagcagagggccgtgatgattctccattatgtagaagggtatcaggtaaaagagattgccggtatcctggggattacggagcatgcggtcaaaaaaaggctgcagcggggaagggagcagtttcggacgatctggaaggaggaatattgcagatgagcacggtgaacggcagtcagttgagacatgcgatgaatcaggtacacatgaaagaaaattttgaggaggaaattatcatgaatgtaagaacacagatagcagacggaacctacagacggaacagctttaagaggaatatggtatcggcggcggcctgcctgctggtaatcgggacagtgtccattccggcctatgcaggatatctgggactcgggagtgcgattaccagcgacaaagtaatggcaaggatgcaggaggttcccgaagaagaggtacaggatatttataacatggtccagtatgagcagcgcagcctccatgccgaccagttcaacagggaatacacaaaggaggaagagaaccggaaggaagcgctgaggaaggaatatgagaacggcagattcccggaaggtacgctgaccctggtggataatgcagggcaggttgtggattctgataagctggtttatgccagagacaccagctgcttctatctgccagaaagggcactgacagacgaagagattctgcagatcctggactttaattccaaaagagactttgcccttgaacagaatccggaggttcgtaaatggataatagaggcaattgaggaaggcgccaaactccggcaggaacggggagatggattgcttccataagtacatttatactggtaaaaagcagggttgatactgcctgaaagtgggcaggtacagggcatcagggttgaacaactcatgatgccctgtaagagcgaaatggaatcagcctgtatacatggaggaaaagagaaaatatgagaacaggaaaatacaggctttggggtatgttgctattggcaggagccgtgagtcttactggttgcggcagcacggaatcgaatgcagatgttatggcggcggatgtacagcagacggacttgccagaggattccgcggattccggttccagtggggattctggcattactccgcaggaaagcggccagagttccgtactgccgccgttatccacagaggcgcagaccatagattataaggggaatgtgcctgtagactggcttacggcgtcttcggatgccatttatttattgagcaaggatcaggacgggggctccggaatcctgaagatgaagccaggggaggctgatggggaggctctgcaggtgacggcaccggatgggatgactttttccgtcatgaccacggatgaacaggggaatttgtatgtggtggcggaggatagggatattgaggcagtgatgagggatgatgaggttgtctgccctacagaacactgtgaagtatggagggtcagcccgtccggtgaggtggcggcaaaactggacatttccgaatatgtaaaacaggaagttttttcaccctgtatgatcgcagtggcagggaacggggatatttacctgtcaacccaaaacgatggaacagcagtgctggcttttgatgcggaaggaaatttcctgaataaaatcagttatgattacaaggtttatggtctccgtaccgctatggggaggggcagggatggaaaggtatacgccgtgcttcgcgacaatgttgcggatgatggcacttccgtgatcgttgaactggacggacgagacggccatataggggatgccacttcttttatgctccgcagtgatggcagtttctactcaaatgtatgcccggggagggactgtgaccttgtgattttcggtgtagagggaatccttggatatgacctggggagcgccaatagcagatggaaggttcccgcaggtaaactgcctttcagcacagaaggttcatatccgatggcagttctgacagacgggagggtgctgtttttggatagaaatattcagtgcgatgaggatgagccaacgaatatgtgggtagaagccgaaggaaccaaattccattatgttccggcggcgcagcagtaggcagtgcctttccgctgctgaatatatgaaatcataccataattatgccaggtgagcatgtcaggagccagtgaaccagaggctttgacatgcttggttggctgttttttgtaaatccccaaagagacagatgcaggagcggacatggaacaaaggagaagacaaccggtctggagggcagagagccggagaaagagagaaaagaggattgccagactaaggcggaggatcatagcctatacagtccggggaatcgtggcggctgtcctggcagtcatgcttctgctgatggtctgcggctgtctgtatctccgggatttttttcgcaaaaataataaggatactgctctaaaggcagattccgttcgggaagctgtacccgcaacggttcctgccgtattggtggaagcaggatacctttccaattacaatgagaggaatcaactgatgtcaggggaataccagggaaagctggcccaggggctggtggaggggatcgtagaagggctggaaggaaaagcggggtagtgttgttcatttcagggcttcccagattcggtcaatagagcgataataaaggaaactaccagaaaggaaacgatcagtgaatacatacaaaaaatcctggaagaaaaaatatataccggttgtggtgatttctctgcttattctggcagcggttctgtatgggatacgaaacggcggagaggatggcagaggcggaaacatccttgccggggcaagcccggatacaagcgctttccagatgtattattttgatggggaaacggttatggtcaggacgctgtatgacagtggtacggagaaggaagtgattaaaaaaatcaatgggattcccctccagacggcagaggaagatgccctctcccagatggagcctcctttttacgggttctggatcagcggtcaggatggctttgatatttccgtgtcgccctccggcggtgtctggcttaagaatgacggggcggtttattatggggatacggatttgtctgttttatgggaacagatggaaggcaaggatgaggatatctggaatgtcctgaattttcccaatgcggggcgcttatctgcataccatactatcttcttgctgaaagcggatgagcagacagcagaaagcccggagggtctgactatgacggtggaggacatcgggacaagcgagattacggtacggattgccaataacagcggggaggaattttcctacggggaatacttttccctccagaagcagatagacggccagtggtatacgataccggtaagggcggataacgtgggattccaggatatcgcccatatccttccggatggggagagcgccagtgagacctataaccttgacttgtacggcacgctggaaccggggatataccggctggtggtggaaatgttgagcgctgagtttctggtgggccatgggagggtggcaggaacagaaggggaataaatgctgttaaaaacagcatggagaagggatgtaacagaaaatggaaagtccttaaatgagggacattcgacataggatatgtgttggatgtcctgtttttgcttaataatttcgttgataaatatgagaaaatatctcatatattgtttacaaaattgaaaaaatgagtataatagatattgaaagacatataaactggagggaaaaagagatgctgtgccaatttacagtgaaaaattataaaagcattcgagatgaaatgacttttgatatgcaggcagctgctatttctgaacatgaaaataatataattcgtgataaagatggagaattgtttttgccgatttctgcaatatatgggccaaatggaggtggaaagtcaaacgtattggaggcaatgcatgcgttggcttcaaaagtacttcgtccattatatgcaactggtgataaggaggaacgtatatttcttcagaaaaggctgctcatcgaaccttttgcgttctcaaaagaaacgaaaagccagccaacagagtttgaaatttttttccgtacagaaatcgcggagtatcgatataaactccatataatgaaggatgttgtaaattatgaaagtctggaccgtgtaagattggacacggggcgacgttcagcgctgttcgaacgggatacggaagaaatttctttaaaaggtgtattttccaaactgaaagccagtgaggacttgtccgcaacattaccgttgctgtcttatcttgggatcacttataaaaaaaatgaggtagtaaaggatgttctggattggtttgaatatggaattgattttttaaactatggtaatccgattgaagaacttcgtatggcagtgtcaaattcagaggatgtgaagcagctcatgcttgacatgatacaggaaatggatctggatatcgtggattttcgtgtagttgaagatgaaaatgacagaatcgatgtgtatacaaagcatttggtggatggctatgagacggagttaaacttactggaagaatccagcgggacaaagaaattatttggcttaatgccatttattgccggatgtttacttacaggaaccgttttggttattgatgaactggatgcaaagatacatcccgttttgctgcgccatattattatgatgtttaatgatatgagtattaataaaaagaaagcacaattaatcttcacatcccatgatttgtctacaatgagcaatgaagtgtttcgaagggatgaaatctggttcgtggcaaaaggtaatgctcaaaactctaaattgtattcattggtggaatttaagaacgaaaaaggcgaatctgttcgtaaggatgccaaattcgataagcaatatctggaaggaaaatatggcgctgatccgtatctcaaaagaattatagattgggagaaggtcaatgcctaaaaaagctggaatggagaagtggaaaaagaagcgccgtcaggagtacctggaaatgaagcggtacagatattatatcttctgcgaggggcagcagacagagcctctgtactttgtgggattcaaaaagctgattgaagataatccgatttacaaggatatggttctaattgaaatagaaccctgtcaggcagaaacgatgcgagtaatcggaatggcggaaagatatgtaaagaagaacaaaatccaaaagggccagatttggtgcgtttatgataaagacagctttccggcagatgattttaatggtgttgtcaatcgggcagagaacttaaataaagaaaattctcaacttcaatatcatacagcatggagtaatgaatgtattgagttctggtttcttttgcattttgcatattatacagcgaataatcacaggagggaatacatagcattcctgaatgataaattcagggaattggggattggaaaatatcagaaaaatatgaaagatatttttgatattttgacggaaaaagggaatccaaagctggcaattcgatatgccagacgtatcataaatgatggtaaaagtaagacaccagcagaaattgcgccgggaacgaaggtgtatgagttggtggaagaactggttaagtatttgccggagcatgttgcacagagatttaaggaagcttgcaattaaagggggagagtatttggatacatcagtaaaaaacaaaaaactacaaactttgccttggtatgccttacatgatattgcagtaaaaaagggaatagaagaaaaagaagttaatgggaaggaaaagaatacaataatagataagatattatcttatgggatcctttcggatgaggaaatagagcaatatgtaaatgattatatttatggtgaccgagtaacgtttacgttatggacatttcaatcatcgttgaaagattcagattatggtattgttaattccctggaaaatgtggaggaggaatatctttctgtttctggatatagaaaattaaaaattttatctgtaaaagaatatgagaaccgtacagaagttttatatgtttatagcaaagaatatgcttacattaatgaggatgggcaaaatgccagtgtatgggaacaacatagaggacggcttttatgacaaaatacattgctgatttatttgaaaacccggtaacacaaataaagcccccaaaatcagcaattgacaaatgcacaaattctaaggccataagcagaattgtgttgcagggaaaaggtggagagaaaacgattgtgtcaagagctgggggaattacgcctgttcaggaagaagagattagcagaattcgttctgagagaattgatacatctgggagttttatctcggcaattaccgagaatattgatgctacgattaaatataatgttagaaacggcagtattggaatttataaacatttgccagcttctgtcctgtttgagtggtctgaaaattcgattaaaattattttggaggaaattgataaattaaaagggaagccagctgaagaaatttttaaagaagtaggacaggaaataaaatggacaggggcaagcggaattgaaattacgcaactgaattggtatttgacacaaattatagcttctcttgatagagacgagtatgagttccagattccggtagataaattatcggtattggataatagtaaatggtttatcaagtttccgagaatatattgcaaaacttgtgattcttatgagactccatattgcactgaatgtggagcagagttgaagatgggaagggggataataaaagaatgtgagtgtggggcaccattaaaaattaaatgtgcggatggtcatgatacttgtgagattgtaaattggtatgttccaaaatctatattggtaagtatgatcaataaaaatattcagaaaatatttaaagactattctttagaatataatatctgcattgtaggcgatatgggatatattgttaatggaacagagaatttgcaaacagaagttgaaattccatttgcaacaatagaatgctttaaacatgattcagtggcccttacgcatagagtgaaagcttatgcggtaaatatgaatgagaaatgtggttctggaacctgttcatatgcaaaaattgaaaaatgtactgaaaatgatggaatggcatgtttacctaaagttttttataccattttaccaggctatcgtccacaacctcataaaggcatggagtatggggatgttgctgcggaagtgaaaattggaaataaagcttatgatttaaagggtatcataaaaaagaatagtgaaaaccgacctagaaaatctgttaatgatgatgaaaaaataagaaaaccactattatcaacatcaggagaagggcaggagataattcgccagtttgtggagcagggaatgatagatgctcgttgtcaaataatagcagtagtcgttccgcaatatattgatgcaggatttaaaggaactttgagacacttggcaaggttgtctggaaagaaagtaacatttattgaattggacgagttatccgagctgatttcaattaacaaaaaaatattggtatcataatgcaatgggaacctttggaaaaatccagaggttcttattgttactatacgctattaaagatttggcggaggacccgaaaataaagaagtggggatgaagtttgtctgttctgaaaagggcaaaaaaagtcgagtacattttccgacatgctgttatactactaagaccaggccaaaggtcagaaaggagaacatcatgccagatcagaatcatatcgttattcaaggcttatgccagaacaatctgaaaaatatttccttaaaaataccaaaagaaaagctcattgtattcaccggggtctccggatccgggaaatccagcatcgtgtttgacaccattgcggcggagagccagcgccagatgaacgaaacctacagcgcttatgtccggggcaggctcccgaagtatgagaagccaaaggcggaaaggattgaaaatctctccccctcggtcatcatcgaccagaaccctcttgggggcaacgcccgttccacggtggggaccatcagcgacatgtattccgccctgcggctgctctactcccggattggggaaccctatgtgggaacgccctcctgcttttccttcaacagtccagggggcatgtgtccggagtgctccggtttggggaaggtgatgacgctggacatccttcctcttattagggaagataaaagctggaatgaggggatggtggaactgcccacgtttcgtgtggggaactggtactggaagcagtacacagacagcggcctgtttgacctggataaaaaatggcaggactattccgaaagggaacggaatcttctgctgtatggttcggaggaaccgggcgggaagcgggtgtcaaagcaggtggagggcatccacaacatgatgagccggctgctgttaaaacgggacagctcggagcttggggtaacttccgcaggccggctggcaaaatatgtccgggaatccgactgtcccctctgtcacgggaaacgcctgaacggggcggctctgtccagtaagattgccgggtatgacatcagcgagatgtgcgggatggaactgaccaggctcagacaggttctggaggcggtcacagacccaaggggcaggtccgtggccgaaagcctggttatgaccctgacccgcatgatcgagatcggcctcccttacctttccctgaaccgggaagcggccaccctgtccggcggagaggcacagcgcctgaagctggtgcgctgcatggggagtgccctcacgggcatgctctatattttcgatgaaccaagcaccgggatgcacccacgggatgtacaccggatgaccaggctgctgcgtgccctccgggataaggggaatacggtcctggtggtggagcatgataaggatgtgatctccattgcggatgaagtgattgatgtggggccgctggcaggaaaaaacggcggggaggttctctatcagggcagctatcaggggctccttggttccggcacattaaccgggaaggccatgaagatggagataccctttaaggcggagccaaggaaacccaaaggattcctgcctgttaaacatgccagcctgcacaatctgaaacatgtttccgttgatatccccctgcatgtgctgactgcggtgaccggtgtggccggttccgggaaaagctccctgatccgggacgtgtttgccgggcagtatccggaacaggtcatcctggtggaccagtccccggtgacagccaccgggcgctcaaccccggccaccttcctgggatttttcgatgatatccgaaaacagatggcgaaagaaaacaacgtgagcgccgccctgttttcctttaacagcaaaggcgcctgcccggtctgcaagggacggggggctgtcaccaccgagctggtcttcatggacccggtgacgaccacctgcgaagcctgcggtgggagtcgctacagtgatgaggcgctttcctatttatacaaaggaaaaaatattgtggagcttctggatatgagcgcaggggaggccgaagacttcttttccggctgtccgaaaatccgcagggcgctgcacgccatggtggaggtggggctttcctacctttcccttggacagcccttatccactctgtcaggaggcgagcggcagcgggtaaagctggcaaaatacctggggcagaaggggaacatctatgtgctggatgaacccaccaccgggctccatgcctccgatgtgaagacaattatgaagcttctggacggctttgtggagcaggggaacacggtggtggtgatcgaacataacatggatgtggtaaagctggcggattacgtgattgatatggggccggacgggggtacgctgggaggcgaggtagtctttaccggaaccccgcaggagctggcggaatatggacagaccattacggctgattatctaaggaaatgctgattaaatcagcatttccttaagaaaacctgaaaacagcaaaaaaagtcgagacaaaaagcgggtatcattataaaatagtaactccaagaaggaggtggtttattttgaaagaacagacagcggcggtccagaggatgcaggattatatcgaagcccatctggaagcggatatcacactggcacagctgtcagccgtctccctgttttccccctggcattcctaccggctgtttaaggagtttttgggggtgacgccggcagagtatatccgcaggctccggctttcccggtccgccatgcggctgaaggaggaacagtgccttgtaacggaggcggcctttgactgcgggtttggcagtgtggacgggtatacccgtgccttttaccgggaattcggctgcaggccgggggaatatctgaaggacccggtgccgattgccctgtttatcccatacggcgtaaaattcagagaactgagggaggatgttttggatatggaaatgaagaatctgcagagcgtatttgtccaggtaatccggaaaccggagagaaaagtcatcatcaaacgggggataaaagcggaagattattttgcgtactgtgaagaagtgagctgcgaggtctgggggatattaaaaagtatggattccctctgcggggagccggtctgcctgtggctgccggaggcctataaaaagcctggcacttccacctatgtacagggggtggaggcagaggcggattacgaaggggaaatcccggaggggtttgatgttatttccctgcctgccgccgagtatctggcagtccagggagagcctttccgggaggaggattattctcaggcgattcttgccgtacagtatgccatcgaccactatgacccgactgtaattggatacgagtgggatgaggaaagcccccgtatccagttggagcccagaggggagaggggatatattgagcttcgggcaattaaaaagcagcaagcgtaacggtgcataccgttaccggaaaaaggaggataagatgagcgaaaccataaaaaagatagaagaggctgtcctgacaaagggcctgaccaaaagctatcggggaagaaccgtgctgaaaggtctgaatctgtcggtcaaggccggcacggtctttggcctgctgggggcaaacggcgccggaaagagtaccaccatcgaatgcatcctgggaacgaaacaggcggatggcggaactgccctggtattggggcgggatgcaaaaaaggaccggcgcgccgtatttcagaaagtgggcgtccagtttcaggaaggggattaccagccggagattaaggtatccgagctttgcggggaaactgcctgcctgtatgagaggccggcagactggcggaagctgtgtgaacgtttcggaatcggggataagataggtcatgccgtgaaaagtctttccggcggggagcgccagcggctgtttattgtcctggcgttgataccgaacccggagcttgtgttcctggacgagctgactaccgggctggacgcaagggcacgccggacggtgtggaaaatccttgaggatttaaagggcgaagggctgaccatcttccttacttcccatttcatggatgaggtggaagccctctgcgatgaaatctgtatcctgagaaaaggggaggccgtgttttacggcactgtggagcaggcgaaggcccagagcggctgtgaacgtctggaggatgcctatttgaaatttgcggacgaggaggttgtggcatgagaacttttttcagtcttttaaaaacagaactgaagctgaatatccggaatatgaacatggtgatctttgccatcattatgccggttgtggtactggtcatccttggtttcatttaccaggcaaagcccgcttttccgggggcggagtatacgttcctggagcagtccatgagcgcggtctgcaccatctccatctgcgccgggggcctgatggggctgcctctggtggtagccgggtaccgggaacggaaaatcctcaaacggttccgggtgacgcccatcagcccggttatgctgctgggggtggaatttaccatctatgtgctgtatgctgcggtttccatggctttggtttttccgatggcggctgtattctggggcgtaaggcttcccggcagcccggcggcattccttgggagctggctccttaccctggtttccaccttaagcatcgggatgatggtgggcggcattgcgaaaaatgaaaaaatggccagtgtgatcgcctgccttttgtactttcccatgctgattttttccggggctacgctgccctttgaggtgatgccggagatgatgcagaaaatcgtagcccttttcccgctgacacaggggatacagcttatgaaggcggcttttctggggatgcatacggaacctgtctgggcaccggcagcggttatggggattgttactattctgtgcgcaggtgcggcggtgaaattttttaaatgggagtgagttctttcgggctatcaattcgtatcgttcaaatgcgaggttttttgtgagagaatcggctatacttaaaacagcaggagggaacacgatggactggataaaacggttgaaccaggcgattgattttatagaagagaacctggatggggaactggattatgaagatgtagccgggattgcgggctgcccttcctactatttccaacagttgtttttatatatgacagacatgacattgcgggaatacatacggcggcgcaggctgtctctgtccgccgtggaactgcaaaaaggaaatgggaaagtaacggatattgccatgaagtatggttatgaatctcccaccgcatttaccagggcttttaagaattttcatggaatcacgccctctgctgtaaaaacggaaccggtatcctttcaggcatatccgcccatttctttttccatggcaatccacggaggggtgccgctgcaattcaggatagaggaaaaagaagcgttccggatactgggactgtcctgtcccctgtcgaaagaactgacagagaattttgaaagaataccaacggtatgggatgccgcactggcagacggaacacttgccagattaatctccatggcagagggaaagccggagggacttctcggtgtcagtatccatcatacggaagactggaaatatctgattgctgtccgttccgatcagaagccgggggaatacgaagaatatcagattccggcatgcaaatgggcggtttttgaaggaaaggggacgaaccgtactcttcaggaactggaaaggcgtgtcattacccaatggctccctacgtctggctacacctacgcagatataccggatattgaggtgtatctccatgcagacccggaagacgcagtctatgaatactggcttcctgtacgataagaagggcatggaaccggaaggaggataccgatggattgtcaggagatgataaatgagcttagggcacaggcttctgagaaatacagggaaaatatgattcggatggggataccggccgaaaacagtattggtgtggcaacgtccgtggtaaggggccttgcaaagaaagccgggaaatcgcaggagctggcatctgaactgtggaatacaaaataccacgaggcaaggatgctggcggtcttgttgatgaacccgaaggtgacaacggatgctgaggcagagaggctgctccttgatgtggtttcctgggatttatgcgaccacctgtgtaaaaatttatttttgaagatgaaaaacagggatatttttattgcggagtggatacaggaacctcagttatataaaaaaagggcggcatttgtgctgattgcagcttctgtgatacatgacaggaagctgacggatgaaacggtggacggctatctggagctggttacgcagtatgcggatgatggacgggagcatgtaaaaaaggcggtttccactgccttgagagaaatcgggaaaaagagttttcattataacgaaaaggcacttttgctggcgcatgagtggatggagggagagagcaggacattgaggtggattggaaaggatgcggcgaaggaactggaaaccatggtaaaggcagaagggcggggacgtctgatttccgcaaataccaggatgggaaaggaatcaggaggttcgggatgaacaagaaattttttgcgcttccgcaggaaaggcaggaacagatcataaatgcggcatatgaaatgcggcatatgaagtgttttccaggaacagctataaaaatacgtccatgtccaggcttgcggatgccggcggcgtatccaaatccctgctgtttcattatttcttaaataaaaaggaactgtatctgtacctttgggagcatgcaggcaggctttaccgtgaaaaagtaaggaagggagatacgcagaccacggatttgtttgagattctctgccagagggttctggcaggctgtgtctttatgagggagaccccgaccatatacctgtttatattgagggcatttttgaggaaaactaggaaatcagggaagaacttcagaataattataagacagcgttttttcacggaacagaggatatacgggggccggcagatatggacctgttccggccgggtattgatacgcagctgttgttagaggagattaacggttatcttctcagctgttactggaagatgttttcaaccggggagctggacccggattttctggagaaggacttcctgaaaagagttggacagtggaaaagggtatacctgaaagaaaggaatcattaagatggcagtttcaaatataagggcagattttcacgcagaactgcaaaaggtttgggagtttgtgacttctctggaggatacggcgtggcgcagcgatctgagcagggttgagattatagatgataagcaattcgtggaatatacaacatccggctaccagaccatctttaccgttacagtgagggaagaatgcaggcgctgggaatttgatatggagaatgacaatatgcatgggcattggacagggattttctccggcgaaggcggcgtgacaacgattgatttcacggaggatgttacagcaaaaaaatggtttatgaaaccgtttatcggggcatatctgaaaaagcagcaggatttatatatatcggatttaagaaaagctttggagcatacctcataagaagcctcataagaaaagcaggaggaattatcttttctattgactttttacaaaaaggagaatagagtgatagcaagcacttgcgtgtaagaggtgggagaatggacgaaacaagccaaaaaatcattgatgcaaccatgtctctgattcgtgataaagggtatgttgccacgacgacaaaagatattgcacgtttagccggcgtaaacgagtgtacgctgttccgtaaatttcaaaataaaaaagatattgtactccatggtgtatctcaggaaaaatggagagcgcatgttacgccggagctttttcaaaatgtgcaatgggagttagagccggatttagagatgtttatgaacgcatatatggataaaatcactccggattttgtaaatctgtccattggcttaagagcgccgcagctttatgaagaaactgcctctatgattatgaaagtaccacaggcatttatttcttctctgacagaatacttcaggaaaaaggaggaattgggggaaattccccattatgattttgaaagtctggcgatgactattttttcttccacgtttggttatacatttttaaatgcgtctttgggccagaaccttactgaggtgggcagagaagaatttatcaaaaacagtgtaaagatatttgtgaatgggattgtacagaagtaaaaatggtactgtatattcagtgccattttatcatacctaactacaagcaactatgcacattcggaaatgctgaagcttgcagaaatgacaggggttcctgttattactaccataatgggaaaaggggcaattcccacaacccatgacttgtacatcgggaatctggaaatccatgggagctacgcggcgaatacagcgatcagtaattgtgatgtcctcttttctatcgggacgaggtttaatgaccgcataacaggaaaaatcggacactttgccacccatgcggcaatcattcatatagacatagactccgcttcgatttccagaaatatagaggtagatattcccattgttgcggacgcaaaaacggctcttttggcattgcttgaaaaagcgcagaaattagatacgcaggaatggctggggcagatcaggcagtggcaggaaatgtttttttgacaggcgttattccagcacctgtatgcggtacagaaaaagctgccccagtagctgtaatgccccgacagagtgctgcccggaatatacgccggatttccttaaattggcggaaagctacggggcaaacggtatccgcgtaacaaaagaaaatgagattgccgctgcccttgaaacaggaaaaaacacgttaaaagtacctactgtcattgaatttatcattgagccagaggaaaatgttatgccgattgttccacccggcaatgctttggacgacatgatactggaaagcggggataagggaatatgaaaaagagatggatttgtttatttgttgaaaatgatataggggttcttgccagaatatcgggattgttttccggaaagtcctataacctggccagcctgaccgtgggaacaaccgaggacagaacgctttcccgtatgacaatcagcttaaccagtgatgacagaacatttgaacaggtaaagaagcagctgggccgatgtattgaggtaattaaggtagttgattacacggacattgctattcatatgaaagagctgatgtttgtaagaataaataactgctcggatcgggatattgacgagatattcaagatttcgcaagtatttcaggtatcgattattgattattccccggcgacagtgctgattgaaagtgtgcatacagaaaaccgtaataatgctctgatcgcgttactggagaaatgctatgcaaatcgaattgaaattgttcgaggaggcagtgttgttgttgaaacattaagcatagctgatcgataaagaggaatgggtcttctcaaaattggtcaatggggtgataatataacgaaagtgaatcagagagggcaagttattatcctataattttttacgccgcagtgcgcagtttcctttaaaagcatagaaatgggcagttagaatacaggaggagaaagggcatgtcatttatgaaggaaatactggaaaagaatatccccatctgggaggaatgtattgcaacaccctttatacaggatctgcaggcgggaacaatgccgatagaatgtttcaaaaattacatgatacaggatagtatttatttaaagcactatgccagggtttatggaaaaatgatctaccatgctcaaaccttacaggagattcagttatattattccatcctgagctttgttacggacacagaatctgctgtgaggcttcaatacctggagcagttgggaatgacggatagggatatggagcatatcatgccgttaccggaaaaccaggattacattgacttcctgttggaaacggcagagggtggagatgggaaagaaatgctgatggcagtactcccctgcatgatgagctacagctatatcttccgcaggctggccatcagttcgacaagcagaaattccaggtactgggactttatcgaggactatgcggatgattcttatgcaaaaggatgccaggagtggtcagatttcgcggattggaaatgcagggggatttccggggcagaaaaagcgaagctgagcagcatctttgaaaaggcgagccttctggaactggaattttggaagatgccgtatcggaatcaaaacactgaaaatagggatgaaatgaagtaaacatttgaaaaagatgtagagtgaaggttaaaactgtgattcataatcaggagaactggctatgaatgcgatataagaatgatacctgtattttgtgaccataatgtttatattgacattagcagcattgccgttacctggaataaaatcagcaaacatgttgaatgaaacggagttacgaaaggagtttaccaatgcttcacattgaacattattctaaaacttatcccggcgggaagaaggcggtggatgatttgactctgcatgtccgtcccggtcagatctatggattcatcggccataacggagcaggcaaaaccaccacacttcgggctgtggccggggtgatggactttaccgaaggcaccatcaccattgacggccacgatattaagaaggctcctgtgcaggcgaaacgtgtcaccgcttttctgccggacaacccggacatctatgagtttatgaaagggattgattacctcaatttcattgccgatctgtatgacatttctgccaagcagcgcactgccgacattggcaaatattccgatgcttttgaactcacagacaatctgggctcccccattggcagctactcccatgggatgcggcagaagctggctttgatttccgcttttatccggcggcccaggctgctgattctggatgaaccatttgtaggtctggacccttcggctgcacatataatgaaaggctatctgtcagaattatgccaaggcgggtcagcggtatttttttccactcatgtactggaagtggcagaaaagctgtgcgatcagattgccattatcaaaaacgggaaactggtgcaaagcggtcccacggcagagctggtgggggattcctccctggaaagcgtatttttagaactggagggagagcgatgaaaaaattttttgtcctgttgaacgtcagcctccggtccatgcttctttccttaaccaattccaggggacgcagtaagagaaaagcggctacaggactgggcgcggtctttctcattgcctttctggggctgtatctgtccgggctttacagttatatgctgatgaaggcgctggcgccatccaatatggaagtgctggtatttgtattcatgggcatggccgcactggtgggcgggcttctgtttaccacctttgcggtgaagggcgtggtatttggcggaaaggacaatgacctgttgctgagtatgccggtgcccgcaaccatgctgatggccagccgggtaaccgccatttatctggagaacctgctgtttgccattttcgtactggttcctgccggggtaatctgtacttttatgacacagaacggtgtggggtacagcctgctgttctggatgcggctggggacctcggtgctggcccttccgctgctggatacggcgctgtccgtattgttgggggcgctggtcgcctttctgtctgttcgggtgtcccgcagagcattgggacagaatattgtgatgggaatattcatggcagcagtgttctatttctcgtttcacctaagcggtatgataaacagtcttgctgagaatgccgccggagtgaaaaactcccttacctgggcggcgcccatgctgtggatgggggaaggcattatgggagacgggaggctgctgctggcctttgtcctgtgctgcgtgttcccttttgccctggtggtaatcggccttggccggggataccgtcaggccgtgactgcttttgccgagcgatccgtacagagcaattacaaactctcggcgcagactgcctccggacagaagaaggctttgctgaaaaaggaaatgcagcgcttttttggtacacccatgtacttctggaatgccggtatcggtctgattatgctgctggccgcaggggtagcctccctggttatgagagataaactgttagcttatatggaaatggccgggtatcctttaccgctgcttcctatggcggcagcggtgattggtttctgcctctgcacctgtcccatcactgcgccttccatcagtctggaaggaaaatacctgtggattttgcgggaatcccccatagaggaaaggtccctgctctgggttaaggttggctttcaacttctgctgaccctgccctgtactgtaattgccgggatgtgtatttcgattgcttttggttttcctttgtggcagggggcggtgctgctcattgccacactgcttttcgccgtagggcatgctgcctttggaatgcttatgggcctgtgctttccgaagcttgacgcagtgaatgaaacggtcgttatcaagcagtctatggccacggtactggcaatgttcgcttccatggcggtactgggggtggcagcgggattctattatctgggcagtaaaacagctccctggactgcgctggcgctgcccataggggtattcgccttgtttgcggcggtatgtatcgtgatccttaccagacagggaccctcactgctgagaaaactatagacaaaaaacagatacagggggtttcgatgaacgggaaattttttacgctgccggaagaaaagcagaagcggattataaatgctgcgtatgtggtatttgccaacagcagttacaaaaaggcatccatgtcccggattgcggctgccggcgggatatcaaagtctctgctgttccactatttccagaataagaaagagctgtatttatacctctgggagaatatcaacaggatatcctgtgaaatagaattaaagtattacagggaaacaacggatttttttgaaatcatgacccaaaagattctggcaagatgtgagtttatgagaacggcccctgatgaatatttattttccatacgggccctttttgcggaacctttggaaatcagggaggcaaccgggaagtcatataaagaagtatatgaagatgcagcaggtgagctgctggggtccgtggacctttccgtgttccgcccgggtgttgacgtgggaatgctgctggaggagattgacagctatctgtttcacagtctctggcagatgctttcagccgggaagctggacccggacggcctggaaagggattttttgaaaagagtcgggcaatggagaattgcttatttgaagtaggctgcattgtggggagaagaacaatggatatcattttatttgtgagtgtaatcgtctaccttattgtaacagcatatgcagggtatgcggcgatagaaaaattaaaaggggacgagctgtcagaagaaaaacggatacaaagataccggttttcctttctgtggaatgtggcttccgggggtgttgttatgttacttattgttatgggaccggctaccctggaggaaacagtcttccgaccgatcagctttttgcaaggaagccataggtatctggcgtttggcacatggattttatgtggtctgctgggtacggtatttatttttcaaatagctgtgtttttgataaatccgacctacagggactctgtttcgaaacagatagaggaaaaaacacattcagggaaagtctatgatcgtgttgtaaacggacttattccaagaaccaggcgggagaagagctattttactgcaacggcactggcagcaggtatctgcgaagagattgtattcaggggatttttgttgtatgttttgaggagaattttcccggaattatcgccgtttctcctggcagctctggcaggtacctgctttggggcagcccatttttatcaaggtatcaaaggcgtgataaaaacagggcttctgggtatattgttcggattcttgtatatcagcacaggttcattgtatttgtgtatggcagttcatttcctgtttgatatttcagccgcatttttatgtgaggaggacaaatatgaggtttgaagccgtaatttttgacctggatggtacgctgcttgattcgatggatgtctgggagaagattgatatttgttttctacagaagcgtggactgccggttccggcagattatgtgactgaaatctgtgcccgcagctttgaggaagcggcgcagtatacaatagacctgtttggactttccgaaaaatcggaggatatcatcagggaatggaatgagatggcagtttatgaatatgcccatcatgtgaaattgtcgccatacgccctggaatatcttatcgagcttaaaaaacgtggcatgaaactggcggttgccacagggctgccaggagaattgtttcttccctgccttgaacataattctgttttggaattgtttgatattctctgctccaccgatgaagtaaaacgtggaaaagagtatccggatgtatttgaacttgcggcgcagaggttaggggcagcccctcagcactgtctggtcttcgaggatgttctgctggctgtcaaaagcgcaaagcaggccggaatgctggtatgcgctgtatatgacaaatattctgcccggtacagggtgcagatggagcaggcagcggatttttacatagcagatttcagagatgctcctttaccagatgcagatttcgaggatgaaaatgaaaaggagtgaacagaaattgaacatagcaggggttaaattcgggataatcttaatcatgacagccatgtgtctggcaggatgtacgaaagaggaagcgtttgttgacagctgtgattcggaaatagcagagcaggtaaccagtattatgcaggaatcccagaagggatgttataacctggagaactgtgaggtctttgttacggaagagagtaaaaaggatggatatgtggtccggagaatgacattccaggcagattggaagcgggtcagggaacctatagatgatccattgatccagggaatgctgcaggccagggatgaactggaatcgcctgaggaaaaggaggctgcagggaaaatcatcgatggatatatcgtggaaatgaatagtgaaccggaatcggaaaggatagaaacaaaatttgttgcacaaatttctccggaaaacgaaacattggaactgttttatccgtttgtacaggagggaaaggaaacgctgcttccattccgggagtatgcggaagaaaactggtttgaaaatgctgaaaagcggatgcaggagggacgcaggcgtttgattgttgaagtcacaggggcagatgaataaggacaatgagtgattaaggagcagactatgaataaagatttgggtaaagaaagtaaaattgggattatgtgtgcaacggccagggaacttgccccatacctgtccgttatgctgaatgcggccatcttagatgttcggatataaataacgtactggaagatgtgtatattgaaagttttatgtgccagaagtatccaggcagtattcaaaatggaattcaacgtaatgctgcgcttatcattcatcatattccaacgcaggaagcgcgtaaggcagaaaagagcgatggactgaccattatgctggatatgattttccgctatgccagagccggaaggacagaggcagaaaaagaatatgataaacagtattgttcccgcttaaattcctgccgtaaaatcattgatgaggcagtggtaagcgctgacccggatattcgcttttatgctacgaaccgcctgatgctaaagttgtggaaatacatcagacaggccattaaaacagcggcaaagagcctgaaaaatgaaataaaccggctttcggaggaagaactgagtaagaaaattcaggagtatttaaatcggaaaatgttatgggtggcactttcagagaccatcggtgcttcggaagaacagaatgaagtggaagaggaaattgaaggctgggacggggagctggaaggggaaccggaatctcaaaatcagaacggtaagaacgaagaattagaaaatgcacttgagaaaatgcgagatgggcagaggcaggaaggaggagaagaggaaacagaggaaggaacggagatagatgagacattatctaatcttttgcagaaaatagcagaggagaagtttctgcaggatgaggaatcggatttaaaaaggaatctggaggaggaggcagcagattttaaattggacggtatccacaaagattcagtgattgaaatgcaccggatgacaacagttcccctgcgattggaaaaagaatataaaatgattgctccagaaataaaccgaatcacaaaacggctggaagcatcgcttgaagatgtgctggagcggctggagggaggtacgcaatcaggtctttacatggggaaacgtttaagccgtggaaatctgtaccggctagatgataagatttttgaaaaaacaataaaaccggaagatggattttcaatcgcatttgcggttctgcttgacctttcaggttctatgtcatccggtggcaggattgagtctgcacaaaaagcgggtcttgtcatgtatacgttttgccggaatctgggaataccggttatgctgtatggccatacaacccatgatacgggatatacggaagtggtagacatttactcttttgcagattttgattctgtagacaatcaggattatttaagaatcatgagtgttagtacctatgattgtaatagagatggagtagcacttagatttgtaggacaaaaactgctaaaccggccagaggatataaaaatattattaatgatttccgatggacagccttatgcccaaggatataaaggcgaaattgcaaaagcagatttgcaagaagccaaatatagcctggaaaaaagaggagttaagttgttttccgcagcaatcggtgatgaccgtaagatgattgaggaaatatacaaagatggatttctgaatattgcagatttcaatacaatgccagtcaaactggcaggtctcatcgcccggttcatcagatagaggaggagacatatggcagaaagggaagaacgggactggtctaacgtagtatccggtcagattgcagtgtataaaacagataaggcactgttagagctcatggataatttaaaaccagcgtcatatttatttccggctcatatccatgcgtccggagacgtgtcagaagttggggaaaggtccttaatccgtcttaatatgctggattacagcaaaggaacaggggataatacagtgagtgtctatgccaatatcagcccagaagaagctaaatacatatactcggcgctctttaatcatctgtgggaatttgattatccccaggaaaagatttttggtaatccagataaggagggttacagtattgtcacaaaacttaatattgtccggtatgatactgattcccaggggaataaacgtaattacccatggtttgtagaaatacaaaacggacgcggcattgcaatgaaaaattccaatggtggtcggtattgtaaaaggaacagttatatctgtgacaagaaagccagtctgtacatcaatgataaagacctgtttatcctattttgcaagacagacgcttatatacgcgcatttgagatggagtatgcatttcgggaaaacaggatcggaaactttaccagcttgtatggtcttttaaagaatgagatacagggagcagccgacagactgctcacttgtatccatagggaagatgaggaacctatgaaaaaggcaggatgatttagttctaaaggcccaggctaaagaccctgtaaaagttgtttgcttgaataagaagggcagatatgatatattagatttgtaaaagcataaattgtctggaacagaaaggagggcttctatgtgccagatctcaatccgcataccggatgcagttatgtatgatacacatatgagtgaggaggaggccgctgcatttgccagatgtatggtagcagtaggatattatacgcagaataatgtgtccataggatactgtgcccagatagccgatatgacagaagaagaatttattaaatatctgggaaagcggaaggtcagtattttccagtttgacaataacgcagagtttttggaggaactggagaatgcgtagagtgattgtaaattccacccccatcattatactttgtaatattggattattggatatactgaaggcgctctatgcagagatttgtatcccggaggctgtgtaccgtgaggtgacagagaaagacgattcggcatgtcaggtattaaagactgcattgaattggatacatgtggaaaaaattgcaaaccagtcagataaaaagatgtataaggcgaagcttcacgatggagaagtggaagtcatgattctggcccaggaggggacagcggacgatttagtcgtgatagatgacaatgctgctaaaaaaacagcaaaatatctcggtctaaaagttaccggaacaatcggagtccttttgaaagccaagagagaggggattatcccggagattgcttccattctcgaaaaaatgaaaaagaacggattttatatcagcgaaagcctggaacaactggtactggaacaggcaggagaacaacacaatatatagtgcaatgaagttgacaaaaactatatatggtggtaaaatgagtgagaaagctgatttatgtaatccaaagattacaaatggtttttgttccggtgtttaactggaagcatgatttttgaagtaacagaataagagcagctattgtgctgcgggaatgaagagacatcaaaatgaattgttttggtgtctcttttttggtgcgcccggcgggcgcacgttctaacgggtgaaagtccctgacccgcccggcagtgggaagggtgcagccaatggcaagggcgtcatcgtgaggtggggtctgaaggaagccggaggcaaaccactggcctgtaaaagttgtccggataggctgtgaagcgtggatgaggttgcctaacaaactaaagtccaataactgcacggaacgccagcagtaaacggggcaggtataagtgggaaagaacgtgtgagtacccggggaggtctcacggacgtgaaagtggcgataaaacattcgctgtcacggagtaaagcttgccgtgagaagtcagcagaggtcatagtaccgggcggtcgcaaacgcaccgggaaggactgaacagtaggaggtgtcgttaccaaatggaaaccggacatggaattaagtacagacaacttcatattgaggactacctgcgagagatacctgcggaacagggaagggaaacaggagagtacgcccatgaaaggattaccgggaaccccgacaccaacacggactttcggacggacaacctgctagatacgattcttagaagcgacaatctaaatgccgcctataagaaggtcaaaacgaacaaaggcgttggtgggattgacggaatgcaggtggatgaacttctaccctacctgagagaacaccagtccgaattggtcgagcaggtgagggaaggcaaatacaagccaaacccagtccgaagggtagaaatacccaaagaggagaaaggaaaaacaaggaaactggggatacccacagtggtagacagggtaatccaacaggcaatcgcacaggaactgacgcccttatatgaagaacagttctctgacaacagcatcggattccgtcccggcagaggggcgcatgacgcactggaaagatgtaggaaatatatcaacgaaggatatgtctacgtggtcagcatggatttacaatcctactttgacacggtgaaccacagcaagctgatagaggtgctgtcgaggacggtgaaggacgggagggtaatctcgctgatacacaagtacctgaaagccggagtaatggaggacggaggatttcacgcaacgaccgagggcgtgccgcagggaggcccgctaagtcccttatgtggaaatgtcatgctgaatgagttggacaaggaactggagcgcaggggacacaagtatgtgaggtatgcggatgactgcctgattctgtgcaaaagcaggaaaagcgcagagaggacaatggaaaacattgtgccattcatcacaggaaaactgtttctgaaagtcaatcttcagaaaacgacagtgagccacgtcagcaagataaaatacctgggctacggcttttaccggcataaagggaaatgccgcatgaggatacacccgaagtcggtggcaaaaatgaagaaccggatacgggagctgacaaccagagggaacaaatggagcaatcaggagagggaagaaaaactccgaagctatgcaaggggatggattaactattatcgatatgcagacatgaaaagcctgatggaacagacggatgagtggctgcgccacagaatccgagcggtgtactggaaacaatggaagaaggtacgcacaagatataaaatgttgcgggcgttacatttaccagagtggaaggtgcatgagatggcgaactgccgaaagggagtgtggagagcggcgggaatgctcaactcggcactcaccaaaagaatcatagtggacagacttggttatcccgatatgactgcccactatctgaaagtccgagtaaactattgaaccgcgtagtaccgaacggtacgctacgtggtgtggaaggggaggttaaaatctcccctatccgatttgtgcgcctggcggcgcacgtttctaacgggtgaaagtcctgaatccacctggtagcgggaaggatatagccgaaggcaagggtgttgcaggtgactgcaaatctgaaggaagccggatgtggggaacgaacccatgggcaaacctctggtctgacggacagaaaccgtatagaaggctgtacatgagggtaagtctgcaacacaagatgaagcccgatagctacacggaatcgtgtacagtaaatgcggcagatagatggagggaaagaaacgtgtggtacccagggaggtctgtacggaatgctctgaaaggagtaaccattgccgagaggtaatgctgagcgtacagaagtcagcagaggtcatagtagctgttttcagtgaaggaccgaatcaataggagtctttagtacgacagggaaaggaggaatgggcagatgggtacagaaaacagagaaagctgctcgcaaagagatagcgcggaacgcaaagggtatgtgagagcgcaccgctcattcaaccggatatggaaggaaagagacagtgcagagccagacatcttaagtaagatactgaacaaggaaaatctgaacagggcttacaaaagagtgaaggcaaacaagggagcgccgggagtggatggaatgaccattgaagcggcgttaccatggctgagggagaataactatgaactggtagagagaatcaggaaggggaagtataccccatctccagtcaggcgtgtggagattccgaagccggagggagggatacgaaagcttggtatccccaccgtaatagaccgtatcatccagcaggcaatgcttcaacagctcatgccaatctacgaaccattgttctcgaaagacagcttcggctatcgtccgggacgaggagcaaaagacgccattctcaggataaaggagtatatcgaacagggatacacgagggcagtagttctcgacttatcgaaatactttgatacgctgaaccatacgatactgctgaacctgttgaggaaacaagtaaaagacgaaagagtggtgcagatggtgaagcggtacctgaaaagtggagtgatggaaaacggtgttgtgacagaaacgaaggaaggctccccgcagggaggaaatctatccccactcttagcaaacgcgtatctgaatgagttcgactgggagttccacagacggggcgtaccgtgtatccgctatgcagacgacatcgtactgctggcaaagagcgaacgggcggcagaacgactgctggaatccagcacgaaatatctggaggcaaggctgaaactgagagtgaatcgggaaaagagccgaacggtcagtgtgttcgcaatccaaaattttaagttccttggtttttgttttgggaagaacggaacagggacctatatccgtgtccatggaacgtcatggaagaaagccaaggagaaactgcgcaggcttacttcccggagcaggtgcgggagtatcatccgaaccaaggaaaagataaaagtctacatgagaggatggctgaactactatgggatagcggacatgaagaaaaacatcgaaagcctgaatggatggttgtaccgccggatacggatgtgtatctggaaacagtggaaactgcccaaaaccagaatgaggaaactcataggactgggagtagacagccattatgcggcaacaatagcctacgaccgcaagggatactggttcaatgccggaaacaaggcggtcaactgggcattaagtaaagaaagactgataaactggggcttttatgacttagccgcagcctatcagtctctgcacaccaactattgaaagcgccgtatacgagaaccgtacgtacggtgctgtgagaggacggcggttaatcaccgcctcctactcgattgcagaaaggaggaagaagccagaaggcggaaaggagggagcggatgagagattcttacaatccggagggatatcattgccttatcattgcaatcttaatgggagtcaatgcaagggaggcccggtttctgtatgaacatggcctgaataatccgatttcccaaaaaatcttaaaaaagaagcatcccaaaattgtgcgggtgtcaacaagaaaggagagaaaagaagttatacagcaactgagaagcgagggttacagtatagaggctatcgcagatattttaaactgtgaccattccactgtgaaacgaaattctaaattgaaaaggagattcacatcatgatgacattagaaaaatttgccgaagctgtcagctctgaagtagccaaaagattaggggccggtttccatgtgcatgttctgaaaccggttatcaacaatggcatagtccagacacagttgtgcattgaaaaagaggggcagcagtttcgcccctctattcacttgaaagatttttttgagtgctacaaaaaaggaacagggcttcaagcgattattgatgagattctggaatgctatgcatcggcgccagatataccggctggtatgcaggagattgtaaatgatatgagttttgagaaaatcaaagacaaaatcatgtgtaaactggtaaatacccacgacaacgcttctatgctggagaacatcccaaacattccatatctggatttatccgttatatttttatcattatgtgaagaaacagaagaaatagcagcaaccttaatgataacaaataaacatttgaactattggtctgtggacaaagaggaattgtatcagagagcattggtcaatatggtaaataagtatccaccagtgcttatgaaaataacggacatgatgtatgtgttaacaaaccggattcacttttggggtgccgaagtcttactctatcccgggctcatgagatactgtgaattacatgtgggaaaggatttcttaatcattccttatagtgtagatgaagtgattctgtttccgaccctgggtgttgaagatgctgtagtttctcaggaactggcggatttgatacagtccattaatgcagaggaagttccggcagatgaacggttatccaatcatgcatatagatattgttccgctgaggataaggttatatgcatttaaggtgactttcattaggataggagaggtttatgcatattcataaatttgcagatatcgcctcgtttgcagagattggggttggagggaatcttccggcaacagaagagtaccgggaattcatcaaaaagctccaccctacacagttcctgacaggacggctgacagctccgttatatgaagtagagtattcctatgtaactgtgcggggaaattaccgaaaggcttataaatatatcctgctgcgtttggagcatgatgatctggacctggagattgaaatgatattctcagactgggtagaggaattaaaccgtatatgtccataccggcgtattttaaatgcacaaattcttaaaataaagcccatagcgtatgcaacaatcccatttgaaatctaaaaaggttccattccctcatttcccggagaaaactcctggttgccgttaaaggccaggttactgcggaccgaggccttgaaagaagagcggttagcggcgtaaaaagacacaccggaaagaatggcttttccgtcaatagcagaataattgcgaaggacgggagagaatggaacaatacagactttttgatgatttttcagataaggtaaaacgggcaatccagttgtttcagatgtttgaagatgctgcggtccggtatcataaggatggttattaccttgccttcagcggcggaaaagacagtgttgtgctttatgtgcttgcaaagatggcccatgtgaagtttcaggcacattatcatttgacaacagtagatcctccggagctggtgcggtttatacgggaggcatttccagatgtcaaggttgagtatccggagctgaccatgtgggatttgattgtcaagaagcagatgccgccgctgcgtacagcacgctactgttgtgaagtgctgaaagaaggagggggcgagggagcctttacggtgaccggagtccgctgggaagaaagcaggaaaagagccaaccgggatttcttagagattcataagaagaaaggggctatttatctaaattgtgataacgaggaagaccgtagaaaattagaaatatgcagcttgaagggaaaaagaatattaaatcccatcatcgactggacagaggaggacatctggtgctttatccgtaagtatcaggtgccttattgctgtctgtatgaccaaggcttttgtaggattgggtgcatcggttgccctctggcaagcataagaagccgggaacgggaatttgagcgatatcccaagtaccgtgatgcttacataagagcctttgaccgtatggtaaaggctcgtaccgccagtggaaaatctaagggaaactggaaggatggtgagagtgtgttccgctggtggatgtatggaaatgaaaaaacagataaacaggttgcaggtcagatggagctaaaggattttatcgacatggcggcttagtcacttcactgggttcgtaaaagacatcaatgagtggagtaaaacgtattgcacgtaagcacccaatacggccgtaatgtacgtataacgaaagaaggaggaccaaatgaaaaaacaatcgtgtaggaactgccacaatattgatctgaataaaaaagaggaaacagaaggaaggctgagtggacgctaccgttatggctgcaccgtacaaagaagcgggtttatatgcggctttatcatcagcgatgagaaactggaagctttggtttgtccaaactggaaaggagggaagatggaggaggcagactacgaaaggctggcggacgaatttggggaaaggcttcaaactctgtatgaccggtggaatatgtggaaaataagggggtgcccggaggcggatgtgcctgacggagaatatttaaatcgactgcgcagtggaatagaagcaatgatgaggcagattgagaataccttcgttgaggcagattacccagaatgttattatgctccccttcctccggttatggatgtggattacatggcgaattgccagcaaattaaagaatccgcaattcgtgcgcttgaagaataccgaaataataaggattatttatggttagcagaccatatccaacatttggataatgaggacaaagaaaacagtgaggcttaccgtctcttgtgtcatgtacaaagtttggaagaagcgatttgcgaagatgcctacttgcagatgaagagagtgagcttccaggaaagcctgtatgatgacctggctaactgtaaaaggcgtattttgaaaagaaagcgccggccatcaaataggaaatcgaaaaaaaatagcccgcagattgttggccagttaagaatcggtgatttgaaggcttcataaggaggaaaagaatggaccatcttatgttagtaaaaaatctgttcaatgatatgtttgtgtttcttaatggtactcaaccgctgcctttagaatcgctggatgatgtctaccagggggaaccactatttctggcgctgattggaggattggaccaggcacttttggttgattataatagcgcaatgcaggaaagctatggattctataagaagtattgcggcagagaacttactgaagaggaatgggaacaagtggtagaagaaatccagatgttcattgataaatggaacaatagctggtgtaagggaatgattttggcgttattggcgttgatggaacaggaagaggacgagcggaaaggagaaggaaagatggagcaggcagaaagttccggagatgaagagttggatagcatagataatgctgcataaagtcagtatagccggggaatggtgaattctccggctgaatttaaaggagtatgacaatgatagaaaaattatataaaaaggttaagaatattcaagattttaacgagacagccagtaagttgcgtcaaatgggactaaaggatgaacttaaaaatcttgccgggaaatataaggttcctgaagtggatttgaaagagttcctctctggaaagcggtatttcctgatagacggaggagagacgcagaaagattatatgtcagcccggagtaagctgttggatgaaatgtttaatcaaaaagagggtttaatcaaaaagagggtttaattccccgcagcttgctgcgtaacaaactttttcaagacatggaggaagtgatatactagaggaaaaaggaaaggagaaattgtgcgatgagtgaaacaatacgcaagtcacacaatgtatcagtactcatgtatcatttcgtatgtccagcaaaatatagaagagtagtaatagatgaagatgtagatagggtaatcaaagaaacgtgtgagggaattcaggaaaggtatgaaataagatttttggaagtaggtacagataaagaccatatacattttcttatccagtcagtgcctgcatatagtccaaaaaaaatcatccaaatagtgaagagcatcatagcccgggaggtgttcgcgaaatgtccacaagtgaagaaaaaattgtggggaggagaattctggacagatggctattacgtagcaacggtgagtgaacatgggaatgagcaaatcataagtagatatgtgaaagaacagggacaggaaaaaaattataaaacaatctataaaaacgtagagaaaacaaagcagtatagcatatgggattatatgtagaggttgcaaccttcgatggggctgtgaagaaatagagtagatgagagtatgaaaaaaagtctgtaaattgagatcttctatgataagttaatgagaaaggtaggtggatgtcgtgaccacctacctttactatacggatgcttttggattctgtcaagatgtattggaaaatcccatcaaattatggtacacttcttacaggaaaacatcaggaggtgtgccatgaagctaaaaacagacgatccctttgtacctgaagatatcagggcaaagatcaatggactgcagtccctgctggatcatgcagccgacttatacagtgatatctatagctggtatgacagtgaactgaaatcctatgacccgaaagccaccgcagacgatgaactgtttgaccctggcacagggactgttgtggaggggatcgattacctgtctatcatggaatccctgtcagagctgcagacagccaacgaatgtaaaatgcagagggattaaccttgtgtcccatcggcctggcctctggcgatgtcttcccgtatcagggccttgatggccccttggacggaagtgtccctgccatatttgtgctgtctgacccaggccaggatatctgcatctgtcttcatattcagttttaacttcacctgtacagtattatagctgtcgtacctgtcctgagcatcgtattttgaaaatccatacatggaaagctcctttccggataggtgtacacctatgcctgtgcgctcttattccggcagtctgccttcgtacataatggacagttccccatagacctgcccccagttgcggatgggcatggtccacttcttcgtcgcctcgaacgtggccaggtacagagcctttaagagcgccgtgctgcccgggaacacgctccgctggcggttgagcttccggtaggtagagttgaggctctcgatcgcgttggtagtatagatcaccttcctgacctccatggaaaacttgaagatgggggataccacatcccagttgtcatgccagcgtttcattgagttggggtactttggcgtccacttttccgtcaccttctccagcgcctccagcgccttttcctcgtttgcggcatggtagatggttttcaggtccgtggcaaatgctttccggtccttgtcggagacgtatttcagcgtgttccgtaccatatgtacgatgcagcgctgctgctccgtcttcgggaatgccgccgttatggcttccttaatgcccgtgagcccgtccgagcagagaatgaggatatccttcacaccgcggttcttcaactcgttcagaacgcagagccagtacttggagctttcattctccccgatctgtatgctcaggacttcctttttaccttccagcgtaaggccgaggatgacataggcggcaagcttgcggattaccccgtcctcccgcacggaataatggattgcgtcgatgtagaccacgggatagacttcctccagcgggcggttctgccagtcttcaatctgcggcagtatcttgtccgtcacgtccgagatgaacccttccgaagcctcaaaaccataaatgtccatcaaggtatccgagatttggcgggttgtcatgccttttgcatacatggatatgatcttctggtcaatgccggaaatgtccttctggcgctttcttaccacctggggttcaaacgtggacttcctgtcctggggcacctggatgtccatgctcccgaagctgctgttgatccgcttgggcttgtagccattgcggtaatcatccgaatccgaccgttctgacctcccatagccgagatgctcatccatctccgcttccatcatctccttcagggtgctccccagcaggtctttgagggcttcctggatatcctccgcagtctggatgtcatactcttccaggagctgatggacgatgttccttttcccctccgtcatgactactttgtgtacgggctgtttttctcttcttgccataataataggcctccttatgataatagattttatcatagaagacctaatgcttaatagctatttacagaaaaactttcatactctcgagtagatggactctatttcccacagccctcccactttttgatccagaagtctgttactttcctaaaaaagcatatacctcccccttacccccatagaaagcgggcccttcttttttatgccgcaacagcagcccttttctttttattcctgaatttatagagattatggcctattgataccaaatatatttccagactcactcggtttagctttcttcttaccacacgtttgtaccattggtcatactttatgattccaaacgtcccttccgcttgtatcgaacggttcatccgcagcagcgctccctggatactttccaggttttcgactacttcctggtgcatacagctcagctcccggttcatacacaccatacggttcttatctgtctttttacattgttccttataaggacatcctccacagtcctcacatgtatagtactcttcctggcgtccatatcggttcccttttactgctttcctgtatgcaaaatggaacttctttccccatgggcacatcagggtcccatccgggcccggcttaaagttcaccgcacgaaacgggttctcatgatattctttatcttttgtctcttttttgtacatcggaaatttcatgtacttttccatcccgtgttcctgacaataaatataattgttgtacgagccgtatcccgcatctgctaccggatatttcgggtaaaacccatacagttccctaaatttctccatcaacggcacaaagcagtccatatccgagcggtactgcttcacgtcgatgaccgctatatattcatccgctgccccgatctgaatgttatatgccgggagcagctggtcgtttcccatgtagtcctttttcatccgcataaacgtggcatcatggtccgttttggaatagctgttgcgttccggaccgcagatccggatctttttcacatattctttcagtttctccgtgtattctttcagcttctcgtaatatctctgctccctggtctttcggtgtcccctgccgtggacaaacgctttttcgtcgatccggcactgaaaagcgtatcgtccaagaatcatctccagaccttgcggagtatattccgtgttcgtctcaaccttcagcccggtataggccagcacgccggacctactcagtaggaagcagcagcggcttccgaacccataccaggaccaaaacggggagccgcctacatttctaagctgtgtcaatgcgacctcgacaatttgagcatctccggccccctaatagacgaatatcttgctgaccaacgtgcgggaatacatatatccgcccacattggcctattcctctggcagaattcagagaaaaaatactatatgatgcagtaaaggacgtatattcctggcccctataaaagccagatagagcttccttcgagccggcctcgtattcctgcgcagagaacaacaacggcgcaagagaatgaatgattagctatggtcgatgccaaaggacgctagtataactcgatttaaataagcttacaatttaagcattggtagtaatctgatttcttggcttacgtgtccgtgctttgggcgcacgtttcccttggttttcaggataataatgtaaacttattaaaattgagttatactagtagtaatttgacaatttgtattacaggttatttgcattttcatagatttcctttctatccttatcggataacagcccttcagtgataaaggcaatcgcaaaaatgacgaacagatttagcccaaaccgtatcagtgtaaaggacacacccaaagaggatatttcaaaaaggagtaaaggaatgcggatactggcgcttgtgcataggaaaagcagcacgtttgaaatcctgcagccctttttcaacagtaccccggcaacaggcagcagcgcatatatgggaacggctgttatcgttccagacaatatggctacggcaacacctttcacaccggaattcgctcccataattcgtatcattttttcacgttcaacccatacgtccatcaggccaatacagatgaatacaggcgtaagtataaagaggaagttgataaagttctttccgctaaaggccaatgctgtttttccaatctccgggtcatagagccaaatgatgagattacaaagcaccattacaaataaaaaccaatacttttttatcgctgttttcatttgagcaacacccccattaggtaagctgtgataaaggaaaatacaaatgcaagcatattccgaagaacggctattttcttacccagatattttgtctctatcgggatcgtgatcagcccaaccgtagtgagcgtagaaacaaataccgccatttggattatgcccgcgccgcttttcagaagttccgaaacaatggggaaagcaatcataacgggtactaacgaaaacgcaccaacaagcgaagctaagagcatgccgataaaacccgtttcttcgcctatcatgcgtctgattgtctccggcgaaagcaccgcaagcgccaccccaacaaaaagcaggatagcaacaaattgcggcaggacgcctgtaaacatcttccacgccttttttaaggataatagtgtttttcttttgtctttcaaaaaagagaaaagcagtaaaagtgctgctaaaccatagaacgaataggtaaaaactgtgttcaactctgttcacgccctccctagattgctttttttaacggcgaaagtaccaacagcgcaacaccgccgcccaaaagggctgttagcagctgtggtatagagaacatattcgaaatcaccgccgcctgcggagccggtaatcttaaaaagaacggcacggctatttgcgcgattccaaggtataggaccaagaatttggcggctgccgcagctgccaaagcaatcattggtgcggtatatttatgcccccaacgcctgttgccaatgaagtgccaaatcagcacgagggtaatgtttcctgccacgataaaggggatcaggctccaaagagggcctattccaatcagcttcgccataacaggcgaaatgacagcaacgcaaagtcctgacatcatgccgcaggtcataacggaaacaatcatcagcatattcacaacagacccagtaataatagtgctccctaatgctccggtagccgcctgcaatacgacaagtaaggcgataaaaactgctgtgcgggtaatccaaagcgttctttctttgatcataattttgagatttcctttctcttctcttgtttttcagattttattatagtacaattttgacaaatgccttgttgcacacgcaacaaaaaacgaggttattgtgatgcgtgagtttatagaagatttaaagcagacaaatctatttttcgccattgaaccagaggaaattgatgggctcctttattgcctctgtgcaaagtatgtccggtacgccaaaggcgactatatcattgaggaagggaacaaggtatacgacttcggaattatgctatcagggcatggacgcgcaataaagtgggatccctctgacagagtgattcttatttctcttctgaaaaagggaagcgagataggggttattttagcggcaagtttagaacacaaaagtcctgttactgtacaggcggaggatgatgtcctggtattgcaaatcccttttgaacgcgtattggcccggtgcgaaaaggcctgcccccggcatgacaggctattacgcaactatataagcattgttgccaaaaaggggcttgtactgcacgaacgtatagattgtctgctgcgtccgacaatacgggagaaaatattgacctacttacagtgtatagcccgcgaacaacaaaaaagaacatttacgattccgatgaatagaaactctatggcagaatacctcaacgtggagcgcagcgcactttcacgagagctgtcctacatgaagcgggacgggattattgattatcataaaaacacgtttagactgatttgagatgcatagaagcagaggttcttgtaagcactttgtaggaagttatgtgattgaggaagaggaattgttgcagacaatggaggagtggttttctaaaaagcgctgataccaatcaagttttcctgcggccgccacttgcaaagcaaaaactggaatgctataatagcgctaacagaataaacaggggagcttgtgtgacaggctgagaggaaggtagaccttcgacccttgaacctgatgcggataatgccgccggaggaagtcgtggagattggtactttttcagggggcatcctatgcaggtgtctcctgtttttttgcgctttttgaaggaaaggatgtgagaacagcaaccgcggtatgcctgcggcgggttgagggggagcgccctgaaccttgtatgacagcgatgggaagccgtgttccggcgtgagaggaggccagtaagcctcgaccgaatctttccaaccggcagactctagcggtctgtcatcattaggggaaggcgccgctatacagggccgttttctctcattacaaaggagtatcatactatgtttgaacagatttttgaaagtgtccggcagaaatccccgctggttcactgtatcaccaactatgtcactgtcaacgattgcgcaaacatgctgctggcttgcggcggctcacctattatggcggatgatccgggggacgctgtggagattaccagtatctgcggcggactgaccatcaacatcggcacgctgaatcagcgcaccattccggccatgcttgccgccgggaagcgtgccaacgagctggggcaccccgtagtactggacccggtgggagccggggcttccacgctacggacggacacggccctccggctgctaaaggaagtgaagttcgcggtaattaggggcaacatctcggagatcaagacccttgcctccggcagcggcaccaccaagggcgtggatgctgatgtggcggatcgggtgactgaagacaatctggatggggcagtatccttcgtcaaggagcttgcaaggcgcattggggcggtgattgccgttaccggagcgattgacattgtggcggatgaggagcgggccttttgtatacgcaacggccgtccggagatgtcctccatcaccggaaccggctgccagctttctgctctgactgcggcctttgtcacagcaaacccggatcagtccctggaggccgctgcggccgccgtgtgcgccatgggtctgtgcggagaagtcgcctacaaacgtatgacagggctggacggtaacgcctcttaccggaactatattatcgacgccatgtaccgcctgaccccggcggaactggagaaaggagcaaactatgaaatgcgataagcggcatatgctgctctatgctgtcaccgaccggacctggagcggggagcagactctctatgagcaggtagaagcggcattgaaaggcggcgtaacttgtgtgcagctgcgggagaaagagctggacgaagcggcgtttcttcaggaggctaaggacatctgcgccctgtgccgccggtaccacataccctttattgtgaatgacaacgtggatattgccgtcgcatgcggggcggacggaatccatgtgggccaggaagatatggtggcgggggaggtccgccgccgggtgggggacgcgatgattctcggtgtctctgtccacacggttgaggaggcccgtcaggctgtccacgacggcgcggactacctgggtttgggagcggtgtttcccacaagcaccaaggctgacgcggaccagatgaccagcgagaccctacgggatatttgcagcgcggtggatgtgcccatcgtagctatcggcggcatcaaccgggacaaccttcttagcctggccggcagcggcgtggacggggcggccctggtatccgccatcttctcggcagaggatattgagaggaattgccaggagcttcgggcgctggcagagaggatggtaagggcatgaggatttgcggcgtgatttttgatgttgacggtacgctgttggattccatgtttatttgggatacgattggcgagacctatttgcgctccatcggatatgagccgcgggagaatttgaacgatacgtttaaaaatatgagcctgcaccaggcggcctgctattaccagacagagtatggtgtgacgctgagtattaaggagattatggctggggtcaacgccatgctggagcggtattaccgttttgaggttccgctgaaggcgggagtaaaggagctgctggcacagctccagcggagcaaagtcaagctgtgtatcgccactgccacagaccggtatctagtggaggatgccctggagcggtgtggggtgctgtcctgttttggggagatttttacctgcaacgaggtgggtcacggcaaggacgaaccggaaatttttgaagcagcgcttcgcttcctgggaacaaagaaggcagagacagttgtgtttgacgatgcgctctatgccgtcaaagcggcgaaagcggccgggtttccggtagcggcggtgtatgacagccatgaaaagaatcaggaggaaatctgtactctgtccgatctatacctgaaagatttgacgcaattggataaactcaggaacttccttccggtttagcggctgggagttttaagcggcaaattgggggcaccaccttttgccgctctataaaaataatgcaaaggagatatagcaatgagaacagcattatcaatcgctgggacagaccccagcggaggcgccgggattcaggccgatctgaaagcgatgaccatgaacggtgttttcgccatgagcgctattacggcgctggtagcgcagaacaccatcggcgtaagagaaattgtagaaatgacacccgattttctcgggcagcagattgacgcggtattcgaggacattccgcctgacgcggtgaaaatcggtatggtagcctcctgcggactgattgagaaaatcgcagagcggctgcgcttctaccaggcaaggaacgtcgtggtggacccggtgatggtggcgaccagcggcgaccggctgatttctgaagaggcggtggacaatctgaaaacctgtctgctccctttggcggccgtgaccacgcccaacatcccggaggcggagatcctctccggcatggttatccacagaccggaggacattgaagccgctgcaaaacagatcagcaacgcttacggctgcgcagtcctgcttaaaggcgggcacaacatcaatgacgccaacgacttcctctatgcgggcggcgtggggacatggtttcatggaacgcgcatcaataacccaaacacgcacggaaccggctgcacgctttccagcgccattgcggccaatctggctaagggctttgacctgcccgcatctatccggcggtcgaaagagtacctttccggcgcactgggggccatgctgaatttggggaagggccggggacctatgcagcacaatttcaatctgacaggtgtatacgcaaaggaggcagagtaatgaagataacagagcggcttttgtccgcaacaaaggatatttgggcgtcttataatgcgcatccttttgtgagggggatccaggacggcacgttagaccgggagaaattcaagtattacatcatacaggactatctctatctggaggagtatgctaaagtgtttgcgttgggcatcgccaaggccaaaagccctgaggtaatccagctgttttctaaatatgtgaccttactgacagaaggggagatggacattcaccgtggctatatgggcagattctcgatttcctgggaggaacttaaggccacaccccgggcgctggataatctctcctatacctcctatatgctccgggtggcatatgaagagggagaggccgaaattctggccgctatcctgtcttgtgcctacagctatgaggtaatcgccaaaaaaatcgtagagaaccgtccggcggcgctggagcatcctttctatggagattgggtcaagggttatgctgatccccactacagtgagacgaatgtattgctgctggaaacaacagaccggctgacctgcagctacaccgaggaccagatcaagcacctcacagatatcttcgtagcctgctcccgttacgagcttgccttttgggaaatggcatggaacatgagcaaatagaggggattcaaggaattgttattataggtttttgctttttcatacacggaatcttgtagatgttctataaatgtgcttaaactgaacgcagcaacaaagcggctgttttacctcttgtccaaaaagccataccgtccgtcattcaacaaagcattccggcggtaagcacaacatttttaaccgcgttagtaagtacatacagcattactgagattgcggcatatggcattaccggaaaactggtaactatacttttctatccggctatggcgttgaatatggtcttaactgcaattataggtcagtgtatcggtggacaacgggttgatcgcgcaaaagattatttaaagtgcgctttgaaatatgggtgtttactgctcttaattctctctattgtcatagtaacattttcaagacagctttccggcctttttgtaaatagccctgatgttgcagctattgtcggtgtgtacttttccattgtgggtatcggctatgttctaaatacagtaacaaatagctttcttggagtattgaacggttttggtaagcctgcaaaaagtatgttgttaatgattttttactatattgtcgtccgtatgcctttagcttatcttctttcatttttaggatttgggctaaacggaatatggggtgccgtacttatcagccatatttgtgcggtagcagcttccgctattgtatcgatattacgtttaaaacaccaaaataattcaaacatattttaccgccgtgtttcttttgtatcgacataatgttacattcttttcatcaaaaaaagcccgccccccggtacgggatatttcggcttcatagatgattacacacatcactataatactgtttatatttcacttgcgcccgattgcattttgcagtcgggcgcattttgtattttctcaaaagtttttctataaaatttctaaataatcccattctaatcctatttatattatataaggtttattttttgtacattgaaaatagcataggttcagttgtcctataacaaaaactgaaatcgagcatacgagagatacgccatagcagaaatgctgcgaaatatatcaaatcaaaataagcccgggcaggggtttgatggcttgtgacggccgcataagctgtgcgaggatgatatcagttggaaacttgtggggactgccgctcacctaatgaggggaggctgcgttagtatggaaacatctggcgtggtttaagctgttttgcgaacaggtaggacaactccagatgccgggggacgagtaaatacggcataaaatttgctttggagaaagcacaaccaccttaatgaaatattataagaagtaaaaaaattgtgaaatgctcttgaggaaacaaaagccaattttttacaatgattgtagagaaacagactgttttaaaaactgagcggttttgtgaaatcaatatagtattagcgattagtctaagattgaaccatgttaggtggcatcaatcatgctcatggctagtacagcattgccaaaataataatgaatagacgttgcttttttattgtagtcggtgcataataattctatcactaaagaatggatgtgttattatgcgaaggaaaacaattgatactatcccggttttatctgatgccatgaaaaacatattatctgctttttcaaaaagccgctcccttccgtcaggactggtcaaaagagccagcattgtcctgcttgcgtcacagggggaactcaaccagaatattgcaccacaggtcgggcttcattataataatgttgccacctggcgcagtcggttcctcgcggcgctcccagccttgcggaggattgaaatggacgacccgaaaaagcttgaagatgagatacgggcagtcctgtccgataaaaaacgccccggtgccccgtctgtttttacgccggaccagatcatgcggatcatcgaccttgcctgcagcaacccaaatgattttgggtacgaagtaagccagtggagtctcccgctgttagtggcagaaattaaaaagcaggggatcgctgaacagatttctgagaaatctgtcagccgttttttaaaaatgaggtagatttacatccccacaaaatccgttactggcttcattcttcggaaaagacggaagccccggaatcttttgcgcggaaagtaaacgaaatctgcggcctgtaccagagtgcccaggaacaaagccgggaaggtgcacacattgtttccacggatgaaatgaccggggtacaagcgctggaacataaatatcctgacaagctcccattacccggccagtgcgccaaaatggagtttgagtatatccgccatggcacgaccagcctcatcgggttctttgatgttgcaacgggccgtatggaaatgccgtatttaaactccacacgcacagaagaggattttgtggaagccgtgaaagcattggtagggacagacccgcaagccccatggacatttatatgcgatggcctaaacacccataaatcggaagcccttgtccgctttgtggcagaagcctgtgcccttggcgtggaactgggcaaaaaagggaaaacagggatccttaaaagtatggaaagccgagcggatttcctgcatgacccttcccaccggatccgctttgtctatactccgaaacacagttcctggatgaaccagattgagatatggtttggcatcattaaccggaagctgctgaagcggaaaagctacctatcaatagaagaactggaagcaagcatcctgcgctttattgaacaatacaatcttacagcacacccatttaagtggacataagccgggataccattagtaatttaatcactgatatttaagcaatgctgtactagttgcctttgtaaagggggtgacagcgatagaagttttacagaaagataaaaaagtatataacgcagaggaaatccaggagattttagggattgggaggagcaaaacatatacctttttggacgaggcgtatcggaatcaaaagccgttccgggtccttaaagttggaaagcttttcagggttcccaaacaatcttttgatgactggctagacggaattagttaaggcgggtgagacagttgaaaagaaaaccacagaatagtgcagctttttttgaaaataattcatggtatcaccgtaccaagatacttcaggacgatggttcgataaagtacagcaaaaagggcgggtttgctaccagtgaagaggctgataagagctataggcgacacgaagatgagtttaaaaaggcgtatcgggcctatcatctggcacatcaaatcaatacagaagtcacgcttaaggattatttgatttattggtttgaggagatattctctcaaagaattgaaacaacaaccagaatggtaggcgcgtatgcggtttatgacttaatcctgccgaatattgagtacgacatcaaggtccggttcaccaatgtagaatatcttgatgcattattggagcgggtagcgaaggtcagtgcctctgcaggaaataaagggcgggagattctaaatatggcaatgaaagaggcagtaatcggtgggtatattaaaaccaatccggttattggcacaaagccgtataagagacaaaagccaaagataacaattctgagtaaagaaaaaatcaaggtcctgctgaaagcgtcttccgaaaataactggtatttggaaatattgttaggcctattctgtggcttacgaaaaggcgagattcttggacttaaattcagtgatttggatatggagaagaggaccgtaactatcagaaggcagattgcttcagatccacttattaaaaaagggagtggaagtaaaatagacaattacggactgatagaacgtgatcccaaaacaccaaacagtttccgagttttgcgggttccagccataatcatagaggaactggaaaaacggaaacgacttgtggagttcaataaggtagtttatgctggtcaatatgatgacaaggattatatcagttgtcagaaaaatggaaaactacatagtttgtcagctttaaatagcgctttaactggaatttgtagcaagaatggccttccgcatatcacggtacatggattaaggcatatgtatgcaacgattttgattgagatgggggttccactgattaagatatctgcattacttgggcacggctctgtccacacaacgtttgaatattattgtgacgtgatggatgaaaacgagaatattctggcatttatgaatcaagcgtttgttccggtggaaaggagggcagtatgataattgatttgagccttcagcagtatgtggattgggaagtaaagccagtgattcctataaagggaaaattcggataccgtgttgttttaaaatacatagatggtactgaaagaactcagcaaaagtcgggatttaagacagataaagaggctaatgctgccagggataacacaataggtaaattacatgctggaacttatattgtatatgagaatgttaaagtaagtgactttttagagttctggataaaggaggatatatgcaagagggtaagaagcgaagaaacttatgctgcttattccaatattgtgtataaccacattattccaatccttggaaataaaaagatgtcagccgttaaccgtggagatgttcaaaagctgtataacgaccgggcagaatattctgtatcagtctcaaggctggttaaaacggtgatgaatgtctctatgaattatgctgtagagaaaaaaatcattgcggagaatccggcagttggtatcaatcttcctaaaaaggtaaagaagaaggaataccatgcccgcagtattgacacacagaaaaccctgacaatggatcagattctgattctattggaggccagcagggacacgccgatacatatgcagatcctgtttaatgtattaatgggacttcgcagaagggaaatcaacggcgtgaaatattcggatattgactatattaaccgaacactaaagcttcgccggcagttggggaagaaaatcaacacaaaaaaagaagactttccacctaaaacctttacgaaacaggaacttggattgaagaccccatcgagctatcgtgatattccgataccagattatgtgtttgaggcgattctgcaacagagggaggtgtatgagagaaataagagtcgcaggagaagccagtttcaggattcaggatatgtttgctgctctaactacgggaaaccgcgaagcaaggatttccattggaaatattataaaaaactgttagcggataacaacctgccggatataaagtggcatcatttacgcagtaccttctgcacactgcttttgaaaaataattttaatcccaaagcggtatccaaattaatgggacatgcaacggagctaatcaccttagatgtatatggtgataaccgggaaattattgctgactgtgtagatgaaatccagccgttcatagatgaggtgcttccgataaaggaggtagacaagcagcttgaggaagaactgttggaaatcgaagttccggcagaagattatgtttaaaaattaagggcagtagtagtttcaatcaaatatcaatttggttctcaaaatgaaacaaggcgcagggaaagaacaaatgttcatacttgcgcctatactttttccttccgctatgttataattttggtgacatttggtattactaatttcattgagtttatatagtgttgcggagttaagaaaatagcattttggtgaccttcattcgtaaaatggcaaaagttcgtctattaggcaactcaaaacggtcttcttttacgaatttctgcctaataggcgaactttttaagtggtcaccaaggaaggaaaaagcgaaaatggagttcaaattacactcagaataccagcccaccggcgaccagccgcaggcgattgaagcccttgtaaaaggcttccaggaaggcaaccaattccagactttactaggggttacgggctctggaaagaccttcaccatggcaaatgtcatccagcgaatccagaagcctaccctcatcattgcccacaacaaaacccttgccgcacagctctacagcgagtttaaggaatatttcccggagaatgcggtcgagtattttgtgtcctactatgactactaccaacctgaagcctacgtcccgtccacggacacctacattgaaaaggattcgtctattaatgatgagatagacaagctgcgccattccgccaccgccgccctgtccgaacgggaggatgtgattatcgtggcttccgtatcctgtatctacggtctgggcagtcctattgattataaggagatggttatttcactgagacccggtatgatcaaggacagggacgaggtcattcacaagctcatcgacattcagtatgaccggaatgatatggactttaagcggggaaccttccgtgtgcggggggatgtactggatatttatccggcatactccgatggggtggcctaccgggtggaattctttggggacgaggtggaccggatatcggaaatagattctctgacagatgaaaccaaagctcagctgggtcatgtggctattttcccggcatcccattatgtggtgccaaaggaaaaaatgatggaagccacagagaacatcctggcagagctggaggagcgcgttacattctttaagagtgaggataagcttctggaggcccagcgcatatcggaacggactaactttgatgtggagatgatgcgtgagaccggattttgttcaggcatagagaattattccaggcatctgaccggaggcctgcccggggaaccgccctgtacgctgattgactactttccggaagatttcctgattattgtggacgagtctcacataactcttcctcaggtgcgcggaatgtatgccggggaccggtccagaaagaccacgctggtggattttgggttccgcctgccgtctgccctggataacagacctctggcgtttcctgagtttgagtctaaaatcaatcagatgatgtttgtttcagcgactccgtctgcttatgaggcagagcatgagcttatgagagtggaacaaatcatacgtcccaccggacttttggatccggagatatcggtgcggcctgtggagggtcagattgacgatctggtttctgaagtaaacaaggaagtggcggctcgtcacaaggtgcttatcaccactctgaccaaacggatggcagaggatttgaccgactatatgagagaggtgggtatccgggtaaaatatcttcactcggatatcgatacgctggaacgggctgaaattattcgggatatgcgtatggatgtgttcgacgtcctggtgggcatcaacctgttgagggaaggacttgatattcctgaaattacactggtggctatcctggatgctgataaggagggattcctgcgttcggagacatccctgattcagaccattggacgtgctgcccgcaacagcgaaggccatgttatcatgtatgcggacaaggtgacggtctccatggctgtggcgattgaggagaccaaccgaaggcgccagatacagcagaggtacaacgaggaacatggaattactccaaccaccatcaagaaagctgtcagggatttgattgccatatccaaggctgtgaatgcagatgataagcactttaagaaggatccagagtccatggacgagaaggaattaaagaagctgtcaaaggaactggagaagaagatgcaccaggccgccgcggagctgaatttcgaggaggcggcaaggctgcgtgacagaatggtagaaatcaagaaaatgctgcaggatatgtaattttatgtaactcatggaacattatacctaaaaatgtaatattcttttaaggattattaaattgtactatagatgccactactttataataaagataggcaataatcacaactggttgcaaatatagacgaggaggataagttttatgaggagaaaaagagggctatgtctgctgctggcagcatccatggtattgggcagtagtttcacggcattggcagcagataagaagattgacacggtgaagctgagcttttcctattcaaaggcgcctgagagcggagatgagataggggatattacagttaaggcgggcagcagcggatttgaagtggactctgccgaatatactaatatagaggaccaggatacctggacggtgggagatataccggaggtaaaggtggagctgtccgccaaggacggatacaagttctcctacacatctaaaagccatttctctctttccggatgtaatgcggatttcaagaaagcaaagatttatgacgatggccagtacattgaggtgtatgctgagctaaaacgtatcggcggtaagcttcagggcgcgtcggatctggagtggagtgacaccacggctgagtgggaggagattgagggcgctaagagctacgatgtgaaactcctccgtgacgacaagacagtcactacggtcagcaccacaggaacctcctataactttgcaggctattttaaccgggaaggagactataccttccgtgtaagggccatttcccgttacaacaataagacaggtgaatggtccgaggattccagctccctgtatattgatgaggatgagcttggccgctatggcggaagcgggcattgggagcaggacggtacaggcgtgtggtatgcttatgatacaggcggatatccggcatcctgctggaagcagattaacggcgcatggtattatttcaataacaagggctatattctcaccggctggcagaagctggacggaacctggtattatctgaatccgtccaacggcatcatgatgaccggctggcaggccatcaacggcaaatggtattatatgaacggcagcggtgaaatgcagaccggctggcaggccattaatggaagatggtattatctggacggcagcggcgctatgcagaccggctggcagaggctgggaggacagtggtattacttagaccccagcggcgctatgctcaccggctggcaggccatcaatggcaagtactactatctgggcaccaacggagccatgtattataatacatggacgccggatggaaaatatgtggatggttccggagcctgggtgcagtaaagcctaaaatcaatattaatagaaccgaaacgtatagaaaggatgcagcggagagattcgctgcatcctcttttttgaaattgagtttgtcataacaaactctttttattgacattttttcgcaataagcatacaatgaatatggttaaaatgtaactacaaaaggagacaggcagcaatgcagaaaaagctgaacgagtgtgaaatcggcggccggtatgttgtatcgggcgtgcaggtggatgagagtattaccagacgtcttgaggccctgggggtcaatgaggggacgccggtgaatatattgaataagaaaggcagcggaagcgttatcatcaaggtgcgcgggacacgtctggccctgggaaagcgcttgtctgaaggtattacggtcagggaggaacaggcatcatgagcggacatgcaagggcaaatggtacggatacatacggcagtgtgattctgggagacagcagggagaagaagctggattcttcaaagcagcatgaggatgacaggacgccgattacagttggatttgtgggcaatcccaactgcggcaagaccacgttgtttaacgcctttaccggcgctaagcttaaggtggcaaactggcccggtgttacggtggagcgggtggaaggagagaccagctataaagggcgtcccatcaaggtcattgacctgccgggcatctacagccttacctcctataccatagaggaaaaggttacccgcaaatgcattgaggacggcggcgtggatgtcatcatcaatgtggtggatgcgtcttccctggagagaaacctgtatctgaccatgcagctcattgagcttaagaagccggtaatcctggctttgaatatgatggatattgtggaagaacggggcatggagatagatatgcaccgtctgcccgagatgctgggtgagatacccgtagtccccgtatcagccaggaaacggacaggactggatgtgttgatgcacgcagtggtccaccactatgaggaggggcctcagggtgtggttatacgctacagccaggaggcggaggaaaaaatcaggctgattgaggaagcgctgtttaaaaagtacggtgagatggataacatgcgctggcatgccattaagttcctggagtttgaccaggtggtgattgacgatcatcccctggacgatgtgagccggattcttccgcgcaattatgaaaaacaaatcatcaacgagaagtatgactatatagaagaggtcataaaggagtgcctgtttaacaaggatgaaaaggctgccaccacggacagggtggaccggctcatgacccatcccgtgtggggtattcctgtgttcttaggtatcatggctctggtatttttcctcacgtttacagtgggtgattttttaaaggagtattttcagatggggctggatatgttttccggcgcagtcctgtcacttctcaccagtgtgcacgcggcccagtggatcacttccctgattgtggacggtatcattgcgggcgtgggcggcatacttacattcctgcccaatatttttattctgttcctggccctggctttcctggaggacagcggttatatggcaagagtggcatatgtgatgaatgaaaccatgggcatggtaggattgtccggcaaggcgtttttgcccatgcttttagggtttggctgcacggttcccgcggtcatggctaccagggctctggagagtgtgaaggacagaaggaggactatattaatcacgccctttatgtcctgctccgccagactgccgatttacgtattattttcggagatgttttttccggacagggccctgattgtggcctattccctttatatcatcggcctgtgtatggcaattctggtggcatttatcgtacatatccatggtaagaatgacagcgcccagaacgctctgctgatagaactgcctgagtataagacgcctaacggccgtacggtggccatctatgtatgggataaggtgaaggactatctcagtaaggccggaaccacgattttcattgcttccatcgtgctctggtttgtactaaaccttggtccggagggatttgtgtcggatgtgtccgacagctttgcggcagtcatcggtcatgttctggtgccggtgctgagaccggctggtctggggcagtggcaggtggcggtggcccttatttcaggtctttccgcaaaggaagtggttgtctccagtttcagcgtcctttacggaatcaacaatgtaaactccgctgccggtatgacagcactttcctcacagcttgccatggctggttttgggggggtaaacgcctatgccctgatgatattctgcctcctgtattcgccctgtatcgcggcagtggcaaccattaagcgggagacgggttcctggagatggaccattggaatggtgctgtttcagctggccgtggcctgggcaggggccatgctggtattccagctgggcagtctgatattttaataatatctggataatggacgtatcgggatcagccggggcagtctgtaagtttaaagtcagcaaacggaagcggggccggcggatgccatggtgatgtccccggtattccttgaatagagatatacctgattggacaggcggtcttccttggggacctcggaccggttaatgtgagttaccagccggctcatctccgcataggaaatatcgccgtcgtcaggcagcagcaggacttcgtggatgctggatggaaggatgatcaaatccttttccaccccctccgcgaagttttttaatacgtcctcatacaggagacaggcagcgccgttgatgccggagcggttgctgagaacgtaaaacggggcaggggtttccggccttggtccggtttcctgaaaatggggattcagttggcggttcagctcctcgatgatacaagccatgctggagatgacaggaggaaacagccgtggagaattggcaagggcagaggtttttaaatcttccagggaaatgttccagatacgcagatggctgttgtgaatcatggcggtcatgaggccggtatcgtcctcatgaatacagaggtagaatactatagccagatccatccagagaatatgagggatgtccttcagaatggcttcattggaggcggcatgtatcagtttgcaggcaatatgagagcgtatgccctcataatcggacagcatctggtagtccaggggcggcggtgtaccgttccggcggtacagggccagaagttctgccacaatctggtctaaaggcattccctcgcggtactggtcatagcagggattcaggtagatggcaggagcgatatgggtattccctctggtgatgcacagtccatccagaatgagcccgttgtttttgggaaccttgcgcaactccagctcatagtcgtctcccagggccgctttcatgcgttcttttacagcagttaaaaattgttcgtataccaaatgtataccccctttaatattatttatgtaaactgaataacagttccatatcttcctgaatggaataataagggaaattccggtgaaatcgccttggataattaccagatggataaaatgaatatcaaaatataaatgaatatcagaaattaaatgaattgacaccagcttaatccataaggacatgtttgtcaatagaggggaacgggatttttttggccgccaggctgtctgggagagtctcagggcggaaaacgctatattttatggggggttcaaggatgtattgtcgttttatagactacacgggcgggaatggcggggatatcacaggaaaatggcaagaaatgaaattgacggatggccatgggactgatatactcgattatagtttcagaaaggaatggggacgagtggacgaacatcattggagcgaggaccatctgatagccagtaccgctgtcctggccggagaaattatgctgataagcggagccgagattgccaggatagagggaaccatacattatatactggggtgctgccatggaaggaacgcacagaccatggtattcagcacaggcatatttgtgagtctggacagccccgatggggaggcgctgaccctggtgcgaagggtggaggcgcgctctaccaacctgaaccggatataccgtgtgaatgaggtgtccaggaagctgtgcggcggcctcatgagccctaaggaggcataccgggagctggaagaaataaaggacagctgccagtataaaagggagttaaaggccctcagttatgcgtttatcgccgtattcttcggcgtggtccttggcgggagtcctgcggactgcctgggggctgctgtaatcggcggaattctgggactggtggtatacgccatatcaggtctgggattcaatgatttctgcgtcaatgggctgggggcgtttaccatcggtattgctgccctggccatgaatcggtggattctgacaggagccagtaatgacgtggttatcatcagcgccatcatgcctttgctgcccggtgttatctttaccacggcggtaagggatactctgaacggggattattcctcaggggcggccaggatgctggaggcagtggtgactgctctggcggtggctgccggagtgggtgcaggcatggccctgttccaccagatggcaggaggaggcggaatatggtagctgcgattcaggtggcaggttcgtttatggcagtactcagcttcgggctggtgctggagatgccgaggaaatatctggggtggtctgggctgaccggcggagtgtgctggctggtatatctgctggtaaaggcaggctccggctccatgatactgggagcatttctggccagtctgtccgtggcccttatggggcacctgtttgccaggattttcagggctccggtcagtgtgttcctggtgccgggaatccttcccctggtgcccggtacatccatctataacagcgtgtattatgttatccgcaacagcagggaagaatccatgtattatctggtggaaacccttcagattgcgggcgccattgccctggccgtgtttctgatggattctgtgtttaaactggtaggaaagaagaaaaggataaaagtgtaaaattaggacttgaagtttcaggaaaaatatagtatcataatggggatgcgtctgtagctcagtggatagagcagtggcctccggagccgcgtgcgtaggttcgattcctatcagacgcattttaaattgcatatttttaatcgttgcggatgccgcagagtcaggtcaaagcttgattccgcggcttttcctgttttgtctgccggttaaaaccagtcagttattcaataatatgtgccggtgagaatgaaaacatattcaaacaggggaaataaagagtgttaaaaaaacgtttattttcattaattttcacacaatcttaacgccaaatcgggattcgtgaattgattttggaaattttaaggagtatactgttactatagtgaaatatatgataacgtatgcataataacgtatacatagagtcattccatccagtattaaagaaagagtgtatttatatgtataccggacttcaaggaagcccaaagggaagtctttgaatatatagtattttggtatagcacattccccattgccattatatatcttggggactaaaaccctacacttatatatttaggaggagacattatatgctgcagatagttaacacaattaattcatacctttctgattacattcttgtatttcttttggtggctgtgggcctttggtatacaatcaaaacgaaatgtgtccagaggtatctttggaagggattgaaacagctttttggcggtttttcactacagggcggttcacagggaggcggaatgagctcatttcaggcggttgcaacagcaatcgcagcacaggttggcaccgggaatattgtcggttcagccggagcgattcttgtcggtggacccggagctattttctggatgtggattatcgcatttttgggcatggctaccatttacgcagaagcaacattagcgcagaagacacgtgtgacagatgcggagggcaatattcagggcggaccggtgtactatatccagacagcctttaacggtaaattcggaaaattcctggcaggctttttttcgatcgcaattattcttgctcttggattctttggatgcatggtacagtcgaactcaattggttccacaattcagatggcattcgggattccatcctgggttgttggtatcatccttgttattatttgtggatttatcttcatgggaggtgtagaccggattgcttccgttaccgaaaaattagttccggtcatggcggcatttttcctgatcggcggtttgggagtactcgtggtgcggtttcagtatattccggaaacatttggtctgatctttaaatacgcattccagccacaggcaattattggcggcggatttggtatggcaattaagacggctattagccagggagcaaaaagaggcctgttttcaaatgaagccggtatgggttccactccgcatgcccatgcacttgcagtggtgaaaaatccgcatgaacaaggctgcgtggcaatggttggtgtattcattgacacctttatcgttcttacactgaatgcattggttattatttccacactttatgcaggaaatggtcctttggcaaatggttatgcaggagaagcggcggagacattaaaaaatacaaaccttgcccaggcagcttttgggattgtgtacggaagcagggccggcgctgtttttgtagctatttgtttgttcttttttgcattttccacaattcttggttggaacttatttgcaaaaattaatgtgacttatctatttgggaaaagagcacaaaaaccattcgtgcttgttgctttggtatttatcttccttggaacaatcggggaaagtgatttggtatggtcattatctgatatgtttaaccagttaatggttattcccaatgcgattgcgctgtttgcattgacgggggtggttaaagagatgcttaagaaccgagacaaataaaattatatacatatgcctgagaatggaaggcggttggcagatggccgcatacattttcaagggacgattacaggataaaagaatgagtcgctctgccggatgatggcataccttgtcaggatatcgcagataatctgtttcagctttggattatctgcggtatttttttggtacagattgcaatttgaaccgctttttgctagaatagagcggagatacttgaatactaacatactccgggcttcgcagtcgggacaggaggactgaatcatgagacaaaacagaagaaggacaggcagcagacgttccgcggacgataagataaaatatatgcgcatggcggcaatcccgctggttattgtgctggtgctggtggcaatcatactggtgatggacaggaagccgtcggataaggaagcatccgcctcaactgacgtatcactttccacggatgaggatatcaatataagcagcgacagctccgcctcgccggaggatggaggggtggagccggacaataaccagtacaccacggatttttcccagtatgagctgaaaaaggacgagataccccaggtaaaccagctgattagcgagtattttcaggcaaaggtggaccaggacgcccagacgctgtaccggatattcgggaaaagcgatgataccgggctggatgcgcgtaaggaagaactgaagaatgaggcggtatacattgaggattatgtggatatcgtctgctataccaagccggggcttacagcggattcctatgtggcctatgtcacctatgaggtgaagttcaggcgcgtggagacattggcgccgggccttatgtggtgttatgtggtcaaggatgacaacggcaatttcattatccgcgagaatgtagtgggtgatgaagcggattatgtggcaaagcagaaccagtctgaggatgtgaagctgctgtccaaccaggtcaatgagaggctgagacaggccattgagagtgatacggttcttgcgggaatttacaaggatttaaggaacggggcagtggtccattcctccgaggaagagaccgggacaggagacagtacggttattctggaggaggaaggcggttccggcacagcaggcggttccagtgtgaagatagaataggcttggaggataagattgaccatggatgtaaaggattttgattatgaactgccggaagaactgattgcccaggaccccttggaggaccgttctgcgtcgaggctgatggtgttggatcgggaaacaggggagatacagcacagaatttttaaggatatcacgcaatacttgcggccgggtgactgcctggtgattaacgatacaaaggtcataccggcccggcttttcggggtgaagaaggatacaggggcaaaaatagagatacttctgctgaagcgcggggagaatgatatatgggagacactggtgcgcccgggcaagaaggcaaagccggggactgtcatcgaattcggcgagggcctgctgacaggaaccgtggtggataccgtggatgacggaaaccgtctgattcagttctattacaaggggatttttgaggaaatcctggaccagctgggccagatgcccctgccgccttatattacgcaccagctgaaggataagaaccgctaccagaccgtgtatgccagacatgaaggctccgcggcagcgcctacggcgggcctgcattttacacaggagcttttggatgagatcgagggcatgggagtgaagattgcccacgtgaccctccatgtgggtttgggtacattccgccctgttaaggtggagaatgttcaggaccaccatatgcattccgagttttatattgtggaggagtccgaggcaaagaaggtgaatgacaccaaggcggccggaggccgggtcatttgcgtgggcactaccagctgcaggaccgttgaatcagcctccacagaggacggcgtgcttaagtcaggaaccggctggacagagatatttatttatccgggttaccgttttaaggtattggatgccctgattacgaatttccacctgccccagtccacactggtgatgctggtcagcgcgctggccggacgggagcatattttaaacgcctaccgggaagcagtgaaggaacgttaccgtttcttctcctttggggatgctatgtttatcgcggcccatccggctgctgagaagcggcagggattgtgggaatgacagaagaaagcgggagaaaatggaagaacgtttaaataaatggctgagccggatgggagtctgctccagacgcgaggcggaccgtctgattgaggccggcaaggtgctggtggacaaccgtcctgcctccatggggcagaaagtaacacccggacagaaggtggtctgcaatggaaagatggtccgggtagacaaaagccacaagcccagaccggtgcttttggcagtgaataagccaaggggcattgtatgtaccaccaccgacaaggacagagctgagaacatcgtggactttttggggtatcctgagcggatttaccccgtgggaaggctggataaggattcagagggactgcttctcatgacaaaccagggggatctggtgaataaaatcatgagaagcggaaatgctcatgagaaagagtatattgtcaccatagataagccggtgacggaacattttctggaacagatggcaggagggatccggcttcctgaactggaccaggtgaccaggccctgcaaggtgaaaaaggtggagcggaatacattttccatcattctcacccagggcctgaaccggcagatacggcgaatgtgtgaagtctgcggctgtcaggtaaggcggctggtgcgggtgcgtatcatgaacatacgcctgggcaatttgaggactggagcttaccgtcagataacgaaggaggagtatgaggagcttacagggcttcttaaggactcctccagtctgtccattaaggagagaaagaatcgataatcaggagagcggaatggaagacaggattcagagaatgaaggaactggtttccgtcctgcgggaagcaggaaaggcttattatcaggaaagccgggaaatcatgagcaattttgaatatgacaagctgtatgacgaactggtatccctggaaaaggaaaccggggtcaccttgtcaggaagcccgtcgcagcaggtgggatatgagatattaagcgagctgcctaaggagacccacggttctcccatgctttctttggacaagacgaagagtgtggaggatttacaggaatggctgggagaccagaaggggctgctgtcctggaagatggacggccttaccattgtgcttacctatgaggagggaaccctggcaaaggcggttaccaggggaaacggagagattggcgaggtcattacgcccaacgccagggtgtttgtcaatatccccctgaacatttcatacaggggacagttgattctccggggagaggctgtcatcacctattcggaatttgagcgtattaacagcggaatcgaggatgtggatgccaaatataaaaaccccagaaacctgtgcagcggttctgtccgccagcttaacagccagatcacggcggaacggaatgtgcattttgaggcatttgccctggtgaaggcggaaggagtggacttttgcaattccaggaaatcccagtttgagtggctgaaaggacagggatttgaggtggtccactatgaagaagtggatgcgggaaacctgcctgaggcagtggagaggtttgcgaaggcagtggaaggaaacgatattccctctgacggtctggtgctgacctatgatgatattgcttacggcgaatcccttggacgtacagctaagttcccgcgcaattccattgcttttaagtggaaggatgaaatcagggagacgactctttcctatattgagtggagcgcttccaggacaggtttaatcaatccggtggctgtgtttgaaccggtggagttagagggaaccacggtcagcagggccagtgtccacaatctgagcatcatggaggggctggagctgggcgtgggagataccataaccgtgtataaggccaacatgattatccctcagatagaggaaaacctgacccggagcggcgtaaaggacataccggaggaatgtcccgtatgcggaggcaggacggaaatccgcaaggtaaatgatgtaaagagcctgtactgcaccaaccctgactgccaggccaagaagataaagagctttaccctgtttgtcagccgcgatgcccttaacattgacggcttgtccgaggctaccctggagaagtttatccaggcaggttttattcacgaatttgcggatatattccatctggaagaacacagggatgcaatcgtggaaatggagggtctgggacagaagtcttatgataacctgattgcatccataaagacagcgtccagtaccacccttcccaggatggtgtacggcctgggaatcgcgggaatcggactggccaacgcaaagatgctgtgccgtgagttcaagtatgattttgataaaatgcgtcatgccggggaggaagaactggtggcagtggacggtatcggcggtgttctggcccaggcctggatggattactttgcttccgagagaaacaaccagatggtagaccatctgctggcggagctgaacattgaaaaggaacagccggaggcagagggcgaggcggtctttgaggggatgaactttgtggtgaccgggtccgtggagcattttgcaaaccggaaggagctccaggagctgattgaaagcaagggcggcaagatcactggttccgtcacggcaaagacagcgtatctgataaataacaatgcagcctccaattcgtccaagaataaaaaggcaaaggaactgggagttcccatcatctcagaggaggagttcctgcgaatgttgtagcacagtatctgccggttttggcagacgctgtgcggtttccgtgtgaaattcagccaacatttgaaaggagagagcgaacatgcctataaaagtacagagagatttgccagcaaaagcgattctggaggaagagaatatattcattatggatgaggacagggccatgagccaggatatccgtccgttggaaatcctgattctgaatctgatgcctctcaaggaagaaacagagacccagcttatgcgggcattgtccaatacacccctccaggtggactgtaccttcctgatgctgtccacccatgtgtcgaaaaacacgtcagccagccatctcaacaaattttatgtcacatttgatgagataaagaagaaaaagtatgacggaatgattataaccggggctccggtggagaatctggagtacgaggaagtgaactactggccggagctgtccatgatgatggagtggagcaagacccatgtgacctccaccatacatatatgctggggggcccaggcagggctttattatcactacggtattcccaaataccctatgaagaagaaactgtcgggcatttataatcacagagtcctggaccggaaggttccgctggtgagaagccttaatgattttttcctggctccccactccagatatacggaggtgaggaaagccgatatcttaaagcatccggagctggctatcctggctgaatccgatgaagccggcgtgttcctggttatgagccgggacggacggcaggtatttgtccagggccatcctgaatatgacaggatgacgttgaataatgagtaccacagggacttaaataaggggttggatccggaggttccttataattattatgaggacaacgacccgttttcagcgccaccgctgacatggcggaatacttccaatacgctttataccaactggctgaattattatgtgtatcaggtgacgccttacctgttagaggtggaggagtagggatacctggggaaacaaggatatctgaataagtccgtgagtatgtggctgcgccgcatatttatgggcttattttcgtaatattgctgtaagctgtaagggaaatttcataaaaagattattccggtataataagatgttggggtcaaaagcccaactatagcaccttgataagcggttctactgaaaccgggaagaaattctttacaggtacaggtgtttatgtaagatatgaactgacggtagagattttaaacggtacagatctttggattgataatgaacgttatgttacaattccttagataatataatctacttttggttaggagtattcgatgctaaatatatgcttttcgtcatcggcttatgtgatgattaagatgattaaaatggagtcagaccaggatatattgtttttacttgatgatttgtcggtcggacatattaaaaatcaaaactatgaaagtcgttttgatgaattttttagtatgtatggctataggtgtcaagataagcaaaaggagaggaatttatttctacaaaattaccaaactcttgtcgaagagattggccggaatgatgtaatacgcatttggtattcaaattcttcttcagaatattttggcatgttatatctctgttctatcatcgattacacgaaaaaagtatatttaacaaattgctccgattatgtcaaagattgcatagcggtatctcttcttgaagactatgagttagccacgtgttcacagcaccataaagttttaaaccaaaaagagcttaaggaatacaaagaaacttgggagcaattggcacaagagaatagcaaacttagagtatatgagaatggaagaataattacttctgaagcttattatgataaagatataaaagagctgctaagtaaaagaatgagtctgcttgatataagtactgaaatatacctaataaacttaagaaaacgtatgctggtaagtgatggatacatacatgtaagaattaaccagctagtattgggtacactcccataaaatgaataatatgagatgtttaataccggagtatcatctaaaaaaagatgatactccgattttctagtgcgaccggcgggcacacgttctaacgggtgcaagtcccgaatccacccggcagtgggaaggatacagccgaacaccaagggcgttgccgtgaggctgggtctgaaggaaggtgtaagcaaacctctgccccaacgcacagaaaccatttcaggccgagcatgggggataaggccgctagacaggtcgaagtccaataactgcacggaacccagctaggtaaagatggtggggacatggagggaaagaacgtgtgagtacccggggaggtctcacggacgtggcaggagcaatacaacatttgctgtcacggagtaaagcttgccgttagaagtcagccgaggccataaagccggtagttgcaaataccggatgaagggctgaacaatatcgattatcctgatatgacagcccactatctgaaagtacgtgtaaactattgaaccgccttggtaccgaacggtatgccaggtggtgtggaagggggacttataattcccctatccgatttaaggtctatgagttaaagtatactgacaataataagtatttatccggatgaatcccttcatgtatctttgcttggatgttacacattgttgacgcggctcccaatcgtttgtcatctcttcacaaggttatttcacagttgcgggatgtggaattgggaacaatcaaacatgttgtatggatagataagatggaatgccggcagccgtgctctggcgatttaatacaatggattacataaaatgtaacaacgggccgccctattcatatccttcactgtctttgctgagtagggttcatgtgggggtatgagccacgaatttagactggaacatattcagttaaaaatgctggccgaaagtctgaacattcagccgccgtcgctttacaaccatatcagcgggctcaatgatttgcaccatgaattaatgctctatggccggaaaaacatggaagaatggatggtggaggccgcggccggcaccagcggatatgcagcatgggaggcgctccgcggagggttttatgcctatgcaaccgccctccccccggcgtgttcagcgctatgctctggtatagcaagtaccaggaccatgagacaatgatggttacgggacagattttctccatttgttctgaggcgacggcctcggtgggaatttcagaagaaaactgcaatcatctgatccgcgccttccgggcgtttttaggggggactttccctgctcgtcaacaacaatgcctttggccattcgctgcctgtgggggacagcttcgagttctccttaaagctgctgattgccggcatgaaggatctggagggcaaatagctttggataagagaatatattatcagacagaaaaggctccacaggatctttcacaatcttgcggagccttttctatgcgaaacagcggagcggaaataatctgaacacacaagaggtatttctttatattagttcatttaattgtcctgtctgtattgcatggatgttttttgttatccgttcctcgggccagtcccaccatttaagctctagcagggtggcagccgtttccccggaataccgtttcctgatcggttttgcaggaacgccgccggcaattgtgtacggaggaacgtcctttgtcacgacggcccggcttccgattatggctccgtcaccaatcgtaacccctgccataacgacggcctcatatccaatccatacatcgtttccgatgacgatatcccctttattgtcccaggaagcgcccacattccccttttccagcccccattcctcaaagaaaaggggaaacgggtaggtggagagagaggaaagggtatgatttgcactgttaaagagaaactttgcgccgcaggcaatggaacagaattttcctataataagatgatcatggtttatggggtaatggtacaaaacattgtttttctcaaacccaaccgggtcattgacaaaatcattgtacatcgtataatctccaaccatgatggatgggtctgtaatggcgttttttaaataaattgtttgtttatctccggtcctgggatataatttttttgtatcggtcattttataattcctcctctgaatttagtccgtaatagtattctaacaattcccgggaataatcaacgattctgccggaaggcaggatcagtacccggttgacgccaatctgctccacaaaccagggattatggctgacaaccataatggtgccttcaaaaagatgaaagtttcctccaatgatgctctgcgtctcggggtccaggtggtttgtgggctcgtcgagaatgagaaggttcgccctttgcagtaaaactttgcacagtgcaatgcgggccttttcaccgggagataagatttctgcctttttatggatatcgtccgcataaaaaagaaagttgcttaaaacagagcgaagctgcttttccgtatatccgtccgtccaggcgttttccagtatcgttttctgcaggtcaatctgttccagctcctgggcgtaataggccacatcggtttttggatgaacatggatgcttcccgtatccggagaatgtatccccataatcagtttgagcagtgttgacttaccggccccattttctccaacaatcaggaaacgttctttttcatgtatctgaaatgataagtcacggtagagaagggactggttcgggtaatgaaaggacagatgctccacttccaggggaatcccgccgccctcacgcatggggcggaggtccatttttacacgcttatagatccggtcgcgggtctgtttcatgcttcgctttttttccagccggagagcgcgttcctgccccatacgcttgagcgcgtggttggtccggcttgcctggtttgccctccggacaaattcctccagctcccggatttctttttcttcctgcgcaatggcctgttcccgcaggcgctgttccagggcatacttctttttgtaagtatcatagttgccttcatagacggatattttgtgtgtggctttatgaatgaacaggattttgttgacaatctggttcagaaagctgacatcgtggctgataatcagcaccataccttgatagcctttcagaaattcaatgacaaattctctggctgccgcgtctaagtggttggtcggttcatccaaaagcagaatgtcagattttgaatacaggacacggccaaaggctatttgcgatttctgcccgccggacagcctgttaaggggcatgtccagcaggccgcttgaaatccccatacggtcaatgatatggagcagaatgctgtctgcctcgtaataatcgtaggattctaaatgggactggagcttttccatttgcttaaacagcatggcatgttccgctgtgccggcgctttccagctttttataaatcacgttcagctctgcctccagtttgtttattggccgcccccttttcaggtattcaagcacggtgcgggattcgtcctcaatggtgatttcctgcggaagataaccaatccgcgaattgccggtggatatggtgccgctgtctaattcctgttcatgcagcagcacgtggaacagggtagtttttccggcgccgtttacacccacaatgccaactttgtcgtgagtgtctatataaaaatcggcatcctcgtagatgacttctgtgccgaaggcgagatttatctttgttcctttcatagctgtatcagcctccttaaatttttgtatgataggtccggctgtgttgtcggagaatccgtttgttttcccagcccttacttttaaaatagagcagtcccacaacagcaggcagcagtggggaaagagcctgcccaatatacacgcccggaaatccaaggccgcagggaaatgccagaagccagcttaccggcagcctgacaatcaccgcgtctaaaagcgcgttgatcatggcgatatttgcagagccgatgccgatggcaaaggaatcgaaggtatacatggctgcatataccaggctgtttacgctgcagcatatcctcaaatacaggattccccccgtagtcatttccgggcttgccggagtaaacaggagaatcagctgctccccgaaaacctgtaccagcaaaaccatggtaagcgtaatgagcagattgagacaaagtcctgtttttgttgttttcctgacctgttttgtatcgcctgctccaatattctggccagccatggctgttacagcctggccaattgcccagcagggcataccggcaaatgtattgatcttaagtcccacgccggaggctgcggccacggatacgccaaattgattcagcattcccgtgatcaggagataggagaggttgacgacaaccatttgcaccgcagtaggcagcccgaccttcaaaatggcagccagtttatgggtttttatggaaaaatgcggtaactgaaagtcgaaaacaaagttcttcctttttaaatgtatcacagcaattacgaaagaaatgccctgtgaaaaaatggttgcgcaggcggcgcctttggtacccatgccaaaggggcctaccagaaggaggtccaatacgatattgacggccgtggcgaccgcaacaaaatagagcgggcttttggcatctcccaaacctttgaggatggaacagaccgcgttatagccaaaaacaaatacggttccgaagcagatgattttcatgtatccgcaggcgtcctccatggctgccgcaggtacatttaatatctgaaaaagcggtccataggctgacaggcccgctgcggtaacaaggactgccgcgataagggaaatggtgaataaagtcccgatggtttcaatttgtccacattcatcctttgcccctttatactgggcggtcaaaaccgtgcctcccatcgtaatgccgatacagacagagctgatgataaaactgatcatggaggcgctgctgattgcggcaagcccattttctcccacgattctgcccacgaccaccatatccactaggctgtaaaaggactggaggagatttgcagccagcagcgggagcgcaaagacgattaattttatgggaacgtttcctgttgttagattttgattgtcattcatttttgtgtttcctttcagcatacaaaaaacagaggtacggtacaaaaacctgcacgccctctgctcttaaagatatatatatttgtcaataagggtattctgaacgccgtgcgcacagaccaccgtattctgacgattagcccgcgttttatgcagaatcatcgccatcatttgacaaaaaggcggcagacaaaacactgtccgccgccgccaaaaacaaaccgctgtttattggaaaacacgaaaacaaaaccccaaactaatgatttggaataaaatatctgctgacgattgtcttcgtattttcaggctccgtacaatgttttgaagtatcaaattgtccggagctgtaatcaatgcagaacttaccgaataacattgcactcaccctttccttttcgtattataagtcattatagacactcatgggcgctctgtcaagcgtttatcaaatgatgctatttttcaataggctggcaggaaaaggagatggtggaaatttgtttatctggagaggaaactatagtggaacggcttgacaaaactaatttgattagttaccaccgggagagaataaatttaagaatatcaaaggacggtttcgggggagatgcggtaatctctgcggctgtaaacagtgatgtcagaatcagcgtccttgaattcctgcagctggaggaaacaccagggctgggtatgagagccgtaaaaagaggcgtgagacaaaaggttccccgggcgatatttccagaggaaccttttcgtacgtataaagcttctgtaaatctatgattcattctgtttatccaacaaatacattgcgtgtatgcctatttgcagcttcagtctgttttccggctgcccgatattgtaagggagtaattcctgaatccgggccatataattcatcatggtattgcggtgtatatgcaaatcagaggcagtcttactgatgttataatgattttctatgtaggtcctcaatacctgcacgtagttaacgtcggcattgctggctctgcataaaggctccactgtttccatgtacatttccatcaggttttcctggggcatcgtggagagccattgatagacctgaatggtgcgaaacaaaaacacatattctgccggatagagcttctgtcccagattgatcgcgtcaatcgcctgaaagaatgcctttgaaatctgctgtgggtcagaagcatacaagctaatgccgatcagtgtggaaatgttgtcccggccgaaaaattgatggatttttttagccgactctgcggcctgatattccgctgtttcctgggacacatcattggaaaagagcagatacagaacataatgggtatgggttttcagaaagaaaaccttacatccataggtgttcgtgatccacgacgtgatggaagcgaagatatcccggattatatatctgcgggtcgatgagatggacatcgaattatttaattcaacagctaagcagatacgttgtttggcataatcaaaattatacatcttacaatagcgcagaatcgtatcggttgaattggattgtgccataattaccgatgccgcaaagtcctgggtgtttattttattgcaggccgttaattggaataatgcggagatatcttttatgactttgtaatgccagtcttccagtttgtttatttccggaatgaccaaaaaagcagcatctccgtcaatgtttccggaatacagcatggtacagtttgtttctccatttgacccgtcaatggaaaagtggtggaactggtaaggctgctgctggtatttttttaggagcttttggcgcatattctcatcaagacctgtccagctctcctggggattggatttgggtggcggggatttttttgggttggggattgggattgggtgggggggggggggggtatgcgaagaaaaattgtcatttggaccatatgagtaatctattagctcaaaccgggaatttgtaagaaaaacaggatttttaagcaccaggcttaattcggacaacattctctcaggcaccttgtacttgctgagtgaatcaacaatatctttgtatgcgattgagacatggtacatctcatctaactgttcttcaaacatacgcttatgaatcgtataggcaaagtcacaaaaatagagattataaggcagttcatatataggaaaatcaagcttgtttccgtcctcgagtataatgttgggaatttcgttgtggtaacggtgcagcttcacgccaagagcggcgcagcccttttctttcagcgacgcaacaaaacctttcaatatggacggattatgaaacgtaatatacccggagtcaacgacaaattcccctccatgaagccagtccaggatttcaggtgtatcgattatgctgaaagaagtaatcttcctgtttgtcccacggaagccggcaacacatcggatttgctcaaggtctgatgtgaaatttgcaactgtaaccattttgtctcaactccttctgacgatttttatgtaaccatatcagttaccacatcattatatcagttaccacatcattatatcagctactgtataattaaacaatatgcacttttttgatttttcttgaaaaaactgtgcacattgacaaggaaacatggggtgataaatgataatatataaataaatatttgaatttgcagaaaacaaatggaatatactggtaaaagtgctgctgacaagctggaaaaagcggagcgaattttataaattttaaaaagtccagaaaggaaaaacagtaatgttattaaaggcaaataaggatcggatatatgataatctgaacacattaagcacttttaacagctgtccggagcaggagggaataacgcgtgccctgttttcagaggcagagatcggggcacgcagttatgtgaaggaactgatgacgcaggcgggcctgcttgtcaccgaggatgcaataggcaatatcttcggaaccctggttggcggctgccctgacttggcgcctgtatggagtggttcacacattgacacggtccgtaatggcgggatgtatgatggaatggtgggggtgattggcgcaattgaagcgtgcaggattataaaggaaaataatatcagccaccagcggagcataaccgcgctggtatttacatccgaagagcccacccgttataaattcgggtgtatcggaagcagggcattggccggccatctttctctggaggagacaaagggccttgttgatgagaacggaatatcactatatgatgagttgaaccggcttggatatacggaaatggattacagtaaagttatgaggagaaagggggatgtttttgcgagcgtcgaactgcacattgaacaggcgcctgttcttgaacagctcaattgtcccattggaatcgtggaagctatttgtgcgcctacatatataaatgtggtgttggaaggacagcaggaacatgcgggctccacgccgatgaatgccaggcatgatgcgatgacggctgcctgtgagattgtgctgaaaatagaaagcctggctcaaagctatggaaacaattatacggtagctacagttgggaggatgcttccgtttcctaattcgtccaatgtcattgcggggagagttgaattttcaatcgacataagagatatcagtgaagatagaaaaacagacatgactcaaaaaatctgctcatacattgatacgattgcaatgctccgcggtttgcgggcctcacattgtgtgacagctgatgatttacctcattcttctgacaaaaagatagtggcggtaatagaagaaagctgtacgagggaggggatattctcaaataaaatggttagcggcgcatatcatgactctttatttatcgctgagtttgcgcctatggggatgattttcgtgccaagccgcaagggtatcagccatgatccggctgagtatacagacatggatgacattgtgctgggaacggaggtcctgacagatacgctcctgaccctgtctaattcaaaagaaatatagtcaaataaagtaacttatcaaccaggtagccgcaccggctacaccagtattacgttaggaggttgcagaatgagcaatattgagcaagtccaacatgtttcaaattcacctatcttgtggctgctatgtggtatcacagtcatcatatctgcgatacagaccgtgctgtacatgaggcagtgcagcaagaccaccagagtggcagggctggatcccaagattcccaaagaggctttcagggtgggactgatatccgccataggccctgcattgggtgtgtttatcgtaatggttggacttatggcttccatcggaggccccatggcatggcttcgtctttccattatcggcgccgcggccacagagctttcggcggcaaacattggagcggaagcatgtggggtgacgctcgggacagagcagtataccttgatatgtcttgcggtctcatggtttaccatggctttaaacggcgcaggctggcttatctttaccggtattgcaaccccatctttagagacacttcgcaataaagtgtctgggggagatatgaaatggctggttgtcttaagcggctcgtgttcccttggcattttcggttatttgaacgcaggtgaaatcttaaagggtatgggcaatacactggcggttctggcaggcgcggtttcaatggtgctcctcgttaaaaccgtgtgcaggaaatacccgaaactgatggaatattccctgggtatcgccatgattataggcatgatattcgcattgggatatgatcagttattcaaatagaccaggagggatgataaatgactgataatgaaatcatgaaagattggaagaaaagcagcattgtaattgggtcacctacaaatatcctggccgccctgacctcatttataccggttatatggctctgtattacctataactgctggccgcccatcagcacggttctcaccgcctggggcatggttgcagcttcctttggagcattttattttgtagagccggtttcctactatgccgctctcggcatgacaggaacctacctcagctttttgtcgggaaatatcggcaacatgcgggttccctgcgcggcgttggcccttgacgtgacacattccacaccgggaaccgttcaggcagaggtggtttccaccatggctatctgcggatccatcatcaccaacctgataggcaccacttccgctgttatcgtgggcggcgcggttctgtccgtgcttccggagtttatcgtggttggccttacgaagtatgccagttccgctatttttggagccaccttcggaaattttgcagttaaatatccaaaggtcgcggtgtttgcattggcaatcccggttatcctgaagatgaccacgggacttccggcggcagcggttatcgtatgtactgtattcggcacattgtttattgcaagggtgttctataaaaagggacttgtcaaataaccgtggatggggataattcattttgaggaaaggagcagtatagtatcatgtgggagaaatgtaaagaattacaggaagaactggttaagatgcgcagggaactgcatcagattccggagctgggcggaaatttaccggagaccagagcatatgtagaggcaaaattaaatgagatggggattccttttgtggaaaatgagactgacagcggcctcattgcaaccatcaggggaggaaaagagggaaagacaatcgcgctccgtgcggatatggacgcccttccgattaaggaggccaatgaggtcgattacatatccagacatgaagggtgtatgcatgcctgcggacatgatacacatatgaccatgctgctgggagcggcaaagatactaaatgaatacaaggaccagattccgggaacggtaaggctgttcttccagacggatgaggaaggctccaagggggctcagaggatttgcgcggagggagccatggacggcgttgacgcagtgttcggaacccatatcggaaccattgtctccaaggatatcaaggctggaaccgtgatctgtgtgccgggctgctgcatggcgtcctttgacaaattcgtaattaaggtaaaaggaatcggctgtcacggttccaccccggaaaaaggtgtggacccggtcaatattgcggcccatatcatcatcaatctccaggaaatcattgcacgcgagattccggcagtgaagccgtcggtactgaccatcggccatgtggaggcgggatttgcttataatgttattccatcagaggttctgattgaaggcaccatccgggctttggaggaggatgtgcgtcaggaattggcaaagagaataggcgagattgccaaggcaacggctgaagccttccggggtgaaacagagtacgagatgatctggggagctccacctgttaccaatgatgccggtatggcggagctggcagctgactgtgcacgggatgtggtaggggacgatatggttatcggccatctggatgccccgaacatgggaggtgaggatttcgcttattatcttgagaaggcgccgggagcatttatgttcttaagctcatccaatccgcagaagcatacggatgtaccacatcataatccgcgctttaatgtggatgaggatgtattctggattggttctgcggtatttgtgcggattgttgaacggttcttccagatttaatgattaagactcagaaaggacttctaagatatgtcaccaggtttattgtttctcgcatatggagtcattgttgtagcggcaatgtacggttttgtgtacatccccaataaaaagaagcataagaaaatgcaggagctgcatgattccgtcaaggccggggatatggtcgtcaccatcggaggggtagtaggtaaggtagctaaaaaggaaggggaataccttacgctgattatcgatgaggaaaagagtgtgaccatgaagattgtactgtatgcagtcaatcagaagatagagaagtgagaaaacacctggattggagaaggataattcagggatcacagcgaatgatgagcggtggagcacccgtccgggtgttccacctttgtggtatgacggttaagagccggcggacagggtccggtataatttcatgtaaattgcgcaagatttcttaagacatacggattggttttgattatactatggtagaatacacggcacccggtgaaccggaacacggtcccgacgtgccggcggcaaggaggcagttttgtgatgagcagtatggatgaggtaatcctggcaattaattttattgaagccaatctgacgaaaaaaatggatttggacatgatttccggcgcggtccattattccaaatatcatcttcaccgtgtgttttccgatacagtgggtcttaccattcacgattacattcagcgcaggcagctgacagagtcggccaagctgcttgtattttcctgcaaaccgattgtacagattgcatttttatccggttatcagagccagcaggcatttaccaatgcttttacagccatgtataagatgcctcccaacatgtacagggaaaatgaacggttttatcccttgcagctcaaattcaattttgaagggagttatgaaatgcttgacagaaaagaaaaggcatcatgggaaatctcgtttgcgtcggatgaggatattccggactggatggaactggtgggacttgtgattgacggttttccccatctgaatgaggaggaatatatccgggtcttaagacagaaaatcagtaccaggcaggcgcttatcctgaaggacggaggaaccgccatcggcatcatgctgttttcctatgaaaacggcagtattgatttcatgggaagccatccgctttacaggaaaagaggtgttccaaaggccatgctggacaaggtcatgagggaactgcttaaggggaaggaaatcagcattacaacctaccgggaaggcgataaggcagataccggataccggaaggaaataatggggatgggctttgcggaggcggagctgttggtggaatacggctaccccacccagcgttttattttacagcaggaggaacgggaccatgagtgattatccggccattccatttcccgatgagttagtacacctggaacaggtgagcgccaggctgtcagacgccctgcagcaggcggaggcatctgtcaggagggcggacagggaatatgcggatacaaaaaaatacatggcggaccacaggggagaaatcgatccccatgagatgttccagaatgaactgctgttaaaacagacagacaggacaggcgcctttgctgtggagatgcgggatcggattgcgaaattaaaggattccccgtattttgccagaattgatttcagggaggagcaggaggaggaagggcagccgtactatatcggacgatttgcctttcagtatgaaaatgaaccgttggtgtttgactggcgcgcgcccatatccggcatgttttatgactgcgaggttggagcggccggatttatggcgccggccgggtggacagccggagagcttaccagaaaacggcagtttaaaatcaggaacggagtcatggaatatgcccttgaaagctctgccaatgtgcaggatgatgttttgcagagggagctgagccatacctctgatgagaagatgaaatccatcatttccaccattcagagagagcagaaccagattatcagaaatgagaaggaggggacaatgattatccagggagtggccggttccggtaaaacctccattgccctccatcgtattgcatttttgctgtaccgtttgaaagacaggctgaccgccaggaatgttacgatcctctcgcccaacaaggtgttcggggactatatctcaggcgtgattcctgagcttggtgaagaacctatctatgagatgagctttggggaactggctgaaatccagttggagggagtcattggctttgaaccggacagggatccctttgagacgcaggatgagacatggagtgagagggtgcggtttaagtcaaccctggactttgtttccctgatggatcagtacatagagcagctgccggagtttatttttattcctacggattatgtgtatggcagcttttcggctaagggggaatggatccgggaccggttcctggcctatggaacctgtccggtaaagaagcggctggcaatggttgcggacgatattcatgaccgctttgagacagataatatcatggaacaggaggtgccccggccccggacaatactgaaacagcttaattccatgcttaccatgaaggacacgctggctgtctataaggatttctataaacggatgggaattccggaatattttgtcatggccgccaggaagacattggagtgggcggatgtgtacccgtttttatatcttcattcagccttccagggattaaaggaaagccatatcaccaggcaccttgtgattgatgagatgcaggattacacgcctgtccagtacgctgccttaaaccgtatgtttccatgccggaaaactattttgggggatttcggccaatctgttaaccctaaccatctacacggtctggaggatttgcggacaatctatgacagggcccagtttgtggaattgaataagagttaccgttctacctatgaaatcatgcgatttgcaaagaaaatccatcatgtatccgccctggaaccggtgaagcgccacggggaacctccggcgctgatcccgtgcctggacgctgcagatgaaatcaggaagataagggaagcgatccgctgcttcaggacagggaaaaatgtgtcgctggggattatattaaagacggacgcggcggcaaaggatatgtatgaggtgctggcagggtatgacggggtggaagaaaaccaggtggaagaaaaccaagtggaaggaaatggagaggaagcgtgtgatataagcctgctcacccgggaaagtaccagcttccaaaacgggatttccattacatcggtccgcatgtcgaaaggtctggagtttgacgaggtcctgattcctcaggcggattgcagaacctatacctctgattttgaccgcggtctgttatacatcgcatgtacgcgggccatgcacaggcttacgcttacgtatagcgggaaggagacggaatttatttccgggcagccgccttttttataaacgtttaaggttgacagaaatcaagtgaatcagtgacaaacggctgaggcgtcagcttggtttgtgtacctgatatttgattttatttttactcttaaggccattcatctgacagggctgagccgcggagtaaaatctgcggcttttgttttgcctttttcaaacgcagaggaggaaataagaatgtttgaatgtatcagtaaaatgttagagcgtccccagcttttccaggagacgaaggttcccttttggaatgataaatacatttcaaagcaaatgctcaaggctcatctggaccctgatttcaacggggctagcagaaagcttccgttcatagaatcgtccgtgaactggataaaagagaccataccgcctgcggactacgctgcacttttagaccttggatgcggtccgggcctgtacgcggaacggtttgccagggcgggctttcaggtgactggcgtagacttttcagaaggttccattgattatgccagggattcagcaaagaggagcggcctggatatccgttatatatatcatgattatctggacttggagctgaaccgctgttttgattttattaccatgatttattgtgattatggagcgctgtcggagagaaagcgccgcactgtcatgcagacaatgtttcaccatctgaaactgggcggaagggtacttttggatgttttttccatggagaagtataaggcattccgggaagggaatacctgggagctgaatccgggcggaggtttttggagggaacagggatatgtggtattaaacaggtacagtaaattcacagaggacgtcacattagaacagattgcggtgctttcagaacgggatacggcggtctattatctgtggaatcaatattttacgatggagacgttggagagggaagcggttcagtgcggatttcgcgtcagcggtgtatatggggatgtggcgggaagggtttatgatgggacaggggatacgattgcggttttattggaaaaactatgacaggataaagggattccaatggcgggaaccccagaaccttgtaaacctggtccgtttcctgtatactaacattcagacacctgaagtccaggcagctcaccagatggcggtccaacgagtgaaaatggaattcagggcagagaaaggcgggatgtcatggagccatttacctgttgtaaattggagatatttataccggaaacacatttaaaggcgctgcagaaagcattgcaggatgtggacgcagggcatataggaaattatgacagctgcatgtcatacagtccggtgacaggctgctggaggcccctgaagggcagcagcccgtttatcggtacatgcggcagcatcagtgcggagccggaactgaaggcagaggtaacctgcaggactgaacggttaaaggaaaccctggctgccataaagaaagtccatccctatgaggagccggtcatcaatgtgattcctctgtatatgactggtatggacgcggatgaaaaggaaatttgaagaaggcaggtacggctgggatgaaattaagggtattggttgataataacacttacatagacagatactatctgggtgaaccggcggtcagctactacattgaatgtgacggcatccggcttttgtttgatgcggggtattcggatgtgttccttaaaaacgcggaggctcttggaatcgaccttggcctggtcacccacatggtgttctcccatggccataatgaccacaccaggggactcaagttcatgaatgagcgcctggatatgtcggggatggaggttatagcccacccgtcctgctttgatgaaaaggtgttcggtgaggaatccatcggcgcgccctattctgctgcggacatggctgccatttgcagatacaggccgtgtgacaggccgtgggacatctcagagcatctggtattcctgggggagataccggacagggcggcctttgagaagagaaatgccattggcaggacaaggataaaggggaagtggcaggatgactatgtgagggatgattccgccctggtctacaggggagaggaaggcattttcatcataacagggtgttcccacagcggtatatgcaatatagtccgatatgcgcaggcagtatgcggccggaagcggattcttggcatcatagggggatttcatctctttgaagcggacgaacggctggctcggacaattgactatctgaaatgcagcggggtggagcagctctatccctgccactgtgtatccctgcgggcgaaagccggaatgatggaggctttgcctgtgaaggaagtaggggtgggaatggagctttgcctggacggacagaccgtgctttaaatcatagattttgcagcagagaaaggttttacatatgatacagacaaaaaaggacatgaagaaaccagggaaccataattcaaaagtaagggatccaagatatgactgcctgcgggcagtcgcggtcatggcaatcatcatggtgcatgccatgccggtggagacagtgagcccccgccaatggtggtttaacagcatcatgacccccttcctgctctcctttgtgggaatctacttcatgctcagcggctgttttctgctggaacatggaacggagcgaatcggggagttttacagaaagcgtcttattacggtgggaattccgttcctggtttacggtcttatttactattgttataatgtccatgtggacggagtggttctgcctctctggaagcatgccgggcgttacctggggcaggtgctgacagccgggattcccagggcgggccacatgtggttcatgtatgccattgtgtctttttatatctgcgcgccctttctgtccaggatggtaaagaacatgacggaccgggaactgaaggtgttcctgctcctgatgctgggaatccatgtggtggaggcggcgggagaaatccttggtctggatgtgaagccatgggcccagtttgtgctgtatacaggatgggtctactattttctcctgggatatggccttaagcgtttatgcaggaaggaacagtttcctgtattcgcggtcctggcagtgcttggcctggccatggatgtggctgcggacatcggcctttcgtggtgggttccccagaatccccataaatcacctgccatggtgttcatctgcgccggagtatttctcctgtttgaatattatggcggggaggcgcctgcgtgggcgggaaggctgggaatattcatcagcaggtacagcttttccatttacctgattcatttccttatcctgagctattatgtgaatccggtacttttaaaggatatgctgacccgccattatatattaggcaccctggtgtctgccgccgtcaccttctttttatccctggcatgttccatgctggtggatcatctggcagtcaggccgctggaacggctggctgagagaatatagagaataagattcaggcgggatacaaaagcgggataccgcggatatcattcagaggaaaaggagacgcgggagcatggaaataaaggtaatagagggagcattttcagtatgcaggcttaaggacctgggacaggccaggatggaggacgatctgtattttctgggcaggaccgatgaggagatatccctggtgtgcaggacagagagcgttcccgaggatacggtttcgagggaagacggatggagggcgttccggattcagggagagctggatttttcgctgataggcatactggccggaatatcagccatattagctgaacacaagattgggattttcgtggtttccacgtataatacggattatattttgacaaaagcagttgattttgagcgggcagtggcacttctggagagtcacggttatggtattgcggggcagggcccggaggaaaagaggacaggtccggccggaaggtgaaaggagcatgttagaatgattaagatacgaaacgaaaaggaatcagattataaggtggtggaggatattaccaggaaggcgttttataaccttcatgtgccgggatgcggtgaacattacctggtccatatcatgcgcgggcatgaggatttcataccggagctggattttgtccttgagctggacggccgggtaatcggaaacatcatgtatacaaaggccaggctggctgatgagtccggggctgaaaaggagattcttacattcggccctgtttccgttgcgcctgaataccagagaaggggctgcggaaagatgctgatggagcattcttttgagcgggcggtgtcccttggatatgatgtgattgtcatattcggaagaccggcaaattatgtgagcagcggctttaaaagctgtaaaaagtttaatatctgtctggaggacggaagctttccggcggcgatgatggtccgggagcttgtacccggtgcgctggacggcaggagatggatttaccacgacagtcctgttatggccatttctgaggaagaggcgcgtctatacgacgacggtctggaaaggatggagaaaaaacaccttccaagccaggaggaattttatatcatgagccattcattcgttaagtaaggcgcttccggtaaagcggtggcatatgttggcctgcgtttcataaagacggatgaggcattggggaatacctgaaatgaaggaaggatatatgacatactgatgtcttgttttgtatgataacatgtcagaaataggatccgcgtcaaacgaatatcagcggagcttggaaaggaatgggtgccatggcatacagtttaaaggaagtaacgatacggacggataattcaggggagggaatggagcgcataggggaactctggcgtcatattatggacggccgtctgcccattctctttgacagcgggcatcagttccgggcaggaatatcccctgtttccaggtacagcggctatgacggtgacgagacaggcagctatgacctgaccgtcatggcggttacaagcgacttcttcacccaaatggatgaaaaggtgaaaatggggcagtaccggaaatatgatgagtgggatgaaaacggcgacctgggcgcctgtacccaaaaggcgtgggagaccgtgtggagccagcagaaggatgggaccatacgcaggagctttacagaggattacgagagcacggttcccgcagaatacaccaaggacggcaaggcacattgttatctgtacattgccgtcggataagaagcggctgaagaaatggagttgtattaagggcttgctgccggcaatggcggccggcctttttgtttttcctctccgtccgcaatctacatacaggtgggggtaaaactgcacaatagaaagtgctgaaataaagggaaattcatcgaaataagttgactatgtaaaagggcctatttataattttcatggtaaagcgcagtgcagggtcagggggtgtcagtttgatgaaggaaatgaaggtaaatctgcggattaaaattatatacacatgtattatcgctgtatttgtcagtgttttccttatcatgcagtattccttcaaccgcagcagaaacctgctgatcacccaggaggcgggtatcatatcacaatatatgaaccgcaatgagctggcgcttacggaggtgacggattccatccgtaagctgtcggctgcatccagcaccaacaagcaggtggcatcctatctgaaccagtcctgtgatggaaatgtatattcgtcggagaatgtcagccgtatccgggctgtggaggagacactgaccttttaccggaatatattttttgattaccggcttcattatattatcctgggagccgacagcacggtctacagcgtggcggacggaattgacaacagcagctattttggggagaaatttgcccagagcgtcagggagcagccatggtaccgccagttcctggaaggaaaggaagtgtccgggtggattgccccatgtatttacaatgataagggtgttttcaaggacaggattgagtccgggaaggatgaggagttcatcttattcatccggcggattaaggattataattcacttaaatttcttggggtgtcctttgtatcctttcccactgaaaatctgtcacaggtgctgattccctatgacggggcggcgctggccctctttgataagggaaaccatctgatttacaccacggagcagagcgatatactggatgatatatctgccggccgtctggcggaggatttacaggaggaccaggattatttccattatacaaaggacggtcaggagtatctggtgaaccatgtgaccatggccggtacaggatggagcatggtgaacctggtgcccctgtcccatattacccaggcagtggacaagcttcacagcaccgtaacctccctgacggtcctcatggccctgggagcctgtatggtctgccttgccatgtatttctatgtcaacgcgcccctcaaccgtctgatccataaggtgagcggggtaaatatcggagggacaaaaatctctgatatggaggatgcaaagggcagacagatgcctgtgttcggaatcgtggaggcagagctggaaatcagcaggatggtggattatatagagaaactctctgcccagactatcaagcagaaggaaatagagcaaaatctccgctatgaaatgctccgggcccagattaatccccatttcctttttaacacattgaatgtaatcaaatggtctgccatgatatccggggcaggcaatatagcggatatgattacctcccttggaatccttctggagagtaccatgaaccgtagggaggaagaggtgcccttaaaggaagaaatacgtgtggtgaaggcatgggtggaaatcaagaactggggccttaagaaccggattgaactggtgacagacattcctcaggagctggaggagtttaaggtgattaaattcttccttcagccgttggcggaaaatgcggtgttgcacggcatgggagaagcagcccacggcaccatttgggttgcggctgaacagtatggggagcgggtatgcgtcacggtacaggataacggagtgggtatggaacagggaaagctggatgagatactgaaggaaatggatgagaacagtaagaaacgccatgtaaccggaatcgggcttaccagcatccatgagctgatgaaagtcaggtacgggccggattacgggctttatattgaatccagggtaggatacggaaccaaggtttttgcggtttttccatataggagagggagtgggacatgctgaaggtaatgattgtggatgatgaaatcatagtgagggtgggatttcagtcctgcattaactgggaggcccacggatgccaggtggtgtccacctgtgaatccggaggggacgcagtggagtacatgaaccgggatgtgcctgatattgtgttcacagacatcatgatgcccggcatggacggaatccagctggtgaagtatataagtgagaaccacccggatacaaaggtggtggtcttaagctgtgtggatgagattgattatgtgaagaaggcaatcaagctgggggcagaggattatatacttaagctgtcttttacccaggatacgctggtggagctcatcacaaggttaaagtccctgattgaggaggaacggcagaaggcgggcaggggcagcccggatatgaaggtgcagtcctttaaccgggaggaggacttaaagacactgctgctgggaaatcacggaccgggggacaatgaaatgctcctggaccggctgggatatacatataatccgtttgagtcctacagggcaggctgttttctggtggacaacgaaaggatgaaccggcctgtcagcggtgcggactcccatatcagaaagtatggtcttttgaacattgtccgtgaatatctcgaaagcctgccaaagtcagacctggcctttaccggtgaaaatgaaatcgtggttttgttcaggagagaagggggaaagagcccggactgcttttttccggacaccctggatttgctcaaccatgccttaaagacccatctgaacctgactctttccatggggatgggacaggagtgctccagccggatggacattccggccggatttgcgcaggccagaaggatggcggcgctgcgtttctttgacggtccggctgcctttcactgcgggaaggaggatggagggcgccccttcatcgcaaaaaggagtgtccagcggagcatgcaggaggccatattcaggcaggatgcaggggaggcattccggctgattgacggctggtttgaggagatggccgggttccggtcctacgaccagattcaggccatacgccggggcgtggtggagacctgggtgtttatatcaggatactccattcccgagggagcggatgtgcctgaatatgacgagatatattctaccggagatttttggggagccgaaacgctgacagagctaaagggatgttttaaggacgcggtccggtctgttgtggattacctgatggccaataagaacgcgaacccggagattacaagatttctccagtatctggaggaccatgtggatgaaaatataagcctggaggaagcggccggatggtgcgccctgggaaagagccagttctgtattctgtttaagaaggctgccggcgacacctttgtaaattatttcaacgggcttaagatgaaaaaggcatttgcccttctgggaagttccaatatccaggtgcaggaggctgccagccgtataggcatacatgacatctcctatttcagccgccttttcaaaaaatattacaatatgagtccaagtgacgtccgtaaattgtgaaaatcatacaataattaaaaagaatcatacgataattcagataaaaaatagggattattttgggtggacgataataccaataatccctatttttttaaattccaaatcagggatgtaacatttatactatgcttacagttaacaaaaacgtgtatagaaggagggtatttatgaaacgtaagttatgtctggctttaagcgcagtaatgctggcgggttcacttgcgggctgctttggggggaccagcggactgccgggagatacgtctaaggcttcggaggctccggccggtaaggaagcggagggaacatcaggggaatcggccgcaggggaggccggtgaaaagacctatacggggacaacaatccgtgtcctcagcatgacaggacagatatcagatgccattgaagcgtatctggatgattttgagcgggaaaccggcattaaggtgaatctggagctgtacggggaagcccagcttcgtgagaagataaccacggaatttctggcgggctcctccaccattgacgcattcctcatgagccctctgcaggacatggcggcttacagcaataacggatggattgaaccgctggatgaatatttgaaggatccggattttgactgggatgacttttcatcagcgcccatggaacagattaagattaagtctgacggagccgtcggagcgcttccgctgtattcttccgtgcagctgatgttctaccggaaggatgtatttgaggaaaagggagtgaaggttcccacaaattacgacgagctgctggatgtatgcggaaaaatcaatgacccggctaataatttttacgcgattgcctgccgcggcgagaagatagctcttacatcccagttctcaccgttcctctacggatttggcggcgcttattttaaggacggaacatgcgcctttaacacaccggagaatctggaagcagccaggttctatggaaagctgctgggtgattatgctccggaaggcatactgaccgcaggatattcacagatgacccagctgtttaacgcagggcaggtaggcatgtgtgtggacgcaattgcactgtatcagaccctgattgatcccaatgagtcttccttctacgacaaggtaggggttgctcccattccggaaggtcctgcgggacgccagtcctataagcaggttgtgtggggcgcgtctatttactcaggctcaaagaacaaggaagccgcatgggaattcctcaaatatgcggcaggcaaggacattgccgccgacatcactccaaagggaatgcctaccttcagggcttctgtttgggaagacgagcgggtgacggctgccatgccggaagattacatccaggcttacaatgaagagattcaggctgataccaccaaccagtacggacttccgcgtatgaccgcagtatccgaggccagggacgccatgggcgaggccattgtgtactccatcgagacaaagggagagggaacggatctggaaagcaaaatgaatgcggcggcgggaaaggtagaccagcttctcaaggatgcgggagagtacggcgcggattatccctatgaggattagtgtatgtctgaaagcaatggaaaggagcctgtaacaaggctcctttctaacaacagagagggatgtatatatgaacaattttgtcaacaaacatattaaatgggtcttttcactgcctgcccttatattcatgatggctatgattgcggtacctattgcaatgaccttcctgttcagcctgagtgactggaacctgctgacgggaaacgggatgctttttaactggggaaagaattatccggatgtgctggccagcagggaattctggcagtccctgggaatcacattttactatacggccattgccacggtggcggaaatgcttttggggcttgccatcgcccttgtgctgaataaggatttcaggggcaagaacggggtgaaggcagtggtgctgctgccgtatatgatggcgccggtggcagtgggacttatgtggatgctgttttacgaaccatcctccggcctgctcaattacatattcacaaccgtgggtctccccaggtcagcctttgtatcggccaaacagacagttatacccgctatcgcggcggtggaaacctggcagatgacccctatggtggtgattgtatgtctggcaggactttcctctctcccggcagaccccatggaggctgccagggtggacggggcgacacccatccagacattcttccaggtaaccctgccccttctcacccagaccctgttctccatcggtctgctgcggttcatagacgtattcaagtcctttgacctgatttacgccatgacaaagggagggccggccaacgcctccaggacactgaacctgtttgcctatgaaacggcattttcctattacaaattcggcctttcatctacaatgcttatgatattgtttgtgattgtgctgctgctcagcgttttagtcatgaaaatacagagaaagctggtggcgtattatggcggttaaaaaatacagggcaaagaaaatcatatcaaaattattattcggcatcctggtgctggtcattatcataccgattcttttcccgctgtatttcgtgttgatttcatcctttaagaatatggcccaggtatatatcatgcctcccaagctctttggattcaaaccgattttggataactatatttatatatttaagacccagcactatggaacctatatgatgaattccaccattgtggcggtggcgtcaacggcgctgtccctgcttttgggggtaccggctgcctatgccatagccagatataaaatggggaaggcaaatacggctatccttacggcgcgccttctgcccaacatatccattttgctgccatattacttcatattttccaagctgcgcatgattgacacctacggtgtgctgatactcagccacatggtgctgtcccttcctctgattgtgtggattatggtgggatttttcagcgatttgcctctggaactggaggaggcagccatagtggacggctgcaccaggcagaaatgctttaaagatgttctcctgcccgtcagcgcgccggggctggtaacctgctccaccctttcattcctggggtcctggaataactttcagtttgcccttatactcagcggtgagaagacaaggacccttcctgtctccctgcagtatttcgtgtcaggcgcggatatacgctgggggcgtatgctggcagccaccattgttgtcatcgtgccaaccatcattctgaccatgctactccagaagtacattgtgcagggcatgacggccggcgcggtgaaaggatagggcagggtcaatggccggaacaggccggaagcggtgacagaggaggtaaatgtggtgataccggtgctggttcatggaaagggaatctatgattccgatgccatgaagatgaaatatacagggatggtcctggaaggaagccggattaaggagatgggccgctttgaggaactgagtcaggcatatcccgatgtccgggtcatggatttttcggacagctatatcctgcctggtctggtcaatacccatgtacatctggagtttacgccttgccgggatacctatggcatctaccggagggaggacaggaaagcccgtctggccagggctgcggaacacgccaggacacttctgcgctcaggcgtgacaacggtccgggacgcaggaagctccatggacctggtaggagctctgtccggcagggaggcaggatcggagccgggaacagagctgccaaggattcaggcagcgggtatgcccctcaccccggacggaggccatctggcctttctgggaaaaacgtccaacagtacggaggaattgatacaggctgtaaaagaaagaaaatcagcgggctgcggctgcgtcaagctgattgtcagcggaggccagcttacaccgggctctgtaccggagcatgacacctacagcagaggggaaatacgggcagcggtggaggcggcccacgagctgggacttcccacggcagcccattgcctgacaaccagttcctatgtgaacgccatggaggctggggtggacagtgtggaacactgcgcctgtttcaggagaaaccgccgcctgggacttttagaacggtgttatgagccggacgtgatggaagcctttcgcggagaccaccggtatttcatgattgggatatccaacaactaccatcaactggaccaggtcagggaaggcgtgagaaaaccggatgagagggaagcctttctgctggaacaggaaaagcgggaatgtgaaatattcggccgtttggcggacctgggaatgcgtcctctggtgggaacagacgccggatgcggatataccttttttgacgaaacctggctggagatggagcttttatgcaggcggtgcggccttacaccggagaaggcgattcacgccgccaccctggagggcgccagggcattggggtacggggatttcctggggcggctggctcccgggtatgaggcggatttcattgccgtagcacagaatcccatccaggatatagaggcgttccgtcacataaaacatgttgtgtgcagaggaaaaatcatagagtagggagaatggatatggaacatatgtatgaacttaagggcacagaagcaatcatatcacccagcctcatatattatgaggaaatcatcagggaaaacataaagaagacaataaggacagcgggaagccccgaacggctgtggcctcatgtaaagagccataaatccatggatatggtgcggatgcagatggagtacggcataacaaagtttaagacggccacggtggcagaggccgagatggccgcaatggcaggtgcggaaagggtaatcctggcctatcctctggttggtccgaacatggaacgcttcgtgaaactggcaaaggcttatccggatactatattctacggcgtggaggatgaccgggcccagtttgaggccctgtccagggtgtgtgtggaacacgatgccgtgctgccaatgctggtggatgtaaatatgggaatgaaccgtaccggcgttcccattgaagggctggaggagctctaccgttttgcttattcccttcccgggcttcgcctgtgcggaatgcactgctacgatggaaaccacaataataaggatgcagccgtaagacgggccgaagtggatgatacggacagaagggtggcggacatcatggaacgcctgaccggggatggaatctgctgcgagctggcagtggcaggcggtaccccctcctttccttgccatgcgggctgtacccggtggtatctgtctccgggcaccgcatttatcacggacgcggggtattatatgaacctgccggatttggattttatacccggcgccgccgtgatgaccagggttatcagccaccctgccgagggcgtgtttaccacggacctgggatacaaggcgattgcgtcagacccggcgggacagcggggctttatcgtgggtctggaggatgcggtgcctatcatacacagcgaggagcactgggcattccggctggaggataaaagcaggataccggccataggaacctgcctctatgtgattcccacccatatatgtcccaccacggctttgtatccggaaattctggtggctaaggagggacgggtggcggccagatggcaggtgaccgcaagaaaccgcaggattacttactgattgtgctggaacaaggaggtattttgtggattgtattgaactgttgagggagctgatacggtttgacaccgtcaatcctcccggaaatgaaaagccggcagcccagtatctgaccggactcctgcagactgcggggtttaggtgtgaagtgcaggatttaggcggaaacagggcaaatctgattgctgttctgggcggaggggatggaccagagctcatgctgaccggacatctggacgtggttccggccgtgggagcgtgggacagcagccccttttccatggcagaaaaggatggcaggctctacggcaggggaaccagcgacatgaaaggcgggatagccgccatgtgtgaagccgccatgggctgtgccgccaggaaagagcctatgaagggaagtctgaagcttttatttgtggcggatgaggagtgctccaatctgggtacattaagctatctaaagacccatggaggaagcggttatgccatcataggagaacccacccggctggaggtggcggttgcccaccggggagtgtccagggattatattgatataaagggggctcccaggcatgccgccctccccgcaggggaggaggatgccgtgatgaaggcatgcagggcagttctggccgtaaatgacatgaatgaaacgctgcgccatgtcacacatccggtcctgccgcctcccggcattgcggttaccatgatagagggatatgagaaggacaatgtggtgccgggaaatgtgcgcctcctcctggactttcggattcacccgggcatggaccatgagcaggtggggcggtttctggacaaaggctttgaacaggccgggattgacggctgccagaggacgctgcgttattatatgccaggcggggagatacgccaggatgaccggttcgtgaagctgtgccttgaggagcgggaacgtctgctgggaatcaaatcattcccacagcccttcgaggcatcctgtgaacagtgtttcctgacagagcagggaatccggactgttatctgcggtcccggtgatattgcccaggcccatacggtgggggaatttacccgggaaaagcaggtgcgggatgccgtgaaactatatgggagaatcatagacagaattctgtacaaaacaaaatataattaaggagagataatgatgatgaaagacgtatatgagattttaaaagaaaaaggaatcactttgccgcagccccctgccaagggaggagtgtacacgccggtacaggagtttggtgacaaatttctttattgttcaggctgcggtccggacctgggaaacggaaatacagtagtgggcaagctgggaaaggatctgacagtggaggagggccagagagcggcatataactgcatgctgaacctgctggcaaacttaaatgataagaccggggatttgaaccggatcaaacggttcgtgaaggttctggcttttgtgaacagcgcggatgactttgggatgcagccccaggtggtgaacgggggatccaacctgattgccgagctgtttggagaagaagcaggacttccggcacgttcagccattggaaccaatgccctgccgggtggaatcgcatgcgagattgaggttctggtggagctgaaatagaagcgcaggcagcagcggaaatcatgacttgtaaaagccggtcccctgctatataattgatagcataaaaagtcagtaaagcccctgaaggggaagctgacaacaggatacggaggaagatacaatgaaaatggtaatcattgagccgctgggcgtggaagagggaaagcttttggctatggcaagggaggcccttggggaccgggtggagattgtgtattacaacacaaagacaacggacaccgcagagctcatagagcgcggaaaggatgctgaaatcattgtggtatccaatctgcctctgaatgtccaggtcatagagggatgcagaaacttaaagcttctggccgtggcatttacaggcgtggaccacattgccatggatgtgtgcaggaagaacggtgtcatggtgtgcaactgcgccggatattccacctgcgctgtggcggatctggtgttcggcatgttaatcagcctgtacaggaatgtgattccctgcgacaaagtctgccgggaggagggcaccaaggacggcctggtgggatttgaactggaaggcaagacgtttggcgtggtgggaaccggggccatcggccttcgtgtggcagccatagcccaggcatttggatgcagggtattggcttacagcaggactgccagggatgtgcccggcgtccgctatgtggatttggagacactgctggctgaatgcgacgtggtttccctccacacccctctcacggaggaaaccaggggactgatgaatgaggagcgcatcggattgatgaagaagaacgcggtgctcatcaacacggccagagggcctgtggtggacagcgatgccctggcaaaggccctgaaggagggcaggattgcgggcgcctgtattgatgtgtttgaaaacgagccgccggtcaggaaggaccacccgctgttttcagcgccaaacaccatagtgacgccccatgtggcatttgccaccagggaagccctggtaaaacgggctgtcattgtgtttgacaatgtggtaaactatctggatggaactccgggaaatgtgattgggtgatatctgtatgaaaaaagtcaggaagcatatcatattttccggcagggtgcagggggtgggtttcaggtacacctcctgttaccttgcccgccccctgggccttaccgggtgggtgaagaatctgtggaacggcgatgtggagatggaggtccagggagatcctctggcgattggccgattcttaaggaatctggagcagggtaggttcatacacattgaacatatggaagcagaagacattccggtgattgaagagggcagtttcagggaaatatattaatatcagtggaggttttatgtttgggataatagtggcgggaaaacgggtatatgataaatttgctgaggatgagatgacggtctacgcggcccaggtctccttttttatcatactctccgtggtgccatttatcatgctgcttttgacagcggtccagatgattccgagcatcagcaatgccaggttcatggaattgattgtgggcctggtgccggtggattataagtctctggcatttcggttggtaaatgacctgtccttaaagtctccggcaaccatgatctccgtcacggccgtcacggcactgtggtccgcgggccgcggtatgttcagcgtggccagaggcttgaaccgtgtaaacggctacggggaaaagcgctggtatgtgattaacaggctgatttgttcaggatacaccattgtgttcatcctggtgtgtatcctgtccctgggcctgctggtgttcggcaacatgattcaggagtttatggtgaaccgttttcccatcatagcggatgtgaccacccacatcattagtttcagggccctgtgggcgatgatgatactgattatatttttcctgggaatctatacctttgtgccggataagaggctgaagctcagggaccagcttccgggagccgtgttctccacggttgggtggatggccttttcctttgccttttccctgtatttcagccatatagggggaaagaattactcttatatgtacggaagccttacagccattgtgctgctgcttctgtggctttatttttgcatgtgcatcctgttcttcggggcggaaatcaattatttctggaaggaactgtttcccggggaaaccgcggagtgaccggagcatgcctgtctcttggataaggggcaggctgtttttgtctttttggtgaaacggtcaggcggctggtcctggcatcgtcgctgacgcacagataatccgggctgtccggggcaaacaggcggtttggcacgccttcccacctgcggtacacaaccaggggacaggagcacagttccttaagggaaatagaattcgccccgagatggggaaagaaacagcgttcccccacagccatcatgatttcaccggataaaaacaatattttatatatggttgattctatgttataataccaggcagtgtgaaaaaatacaatggattccggcagaggagtgaaagacaattatgaaacgattgttcagttatatgaaggattacaagctagaaagcatactggggccgctgtttaaaatgctggaggccagctttgaactgtttgtgcccctggtggtggcccgcatggtggacgtgggaatccggggcagggacagcggatacatccttaagatgggaggcgttctggtgcttctggctctgattggcctggcatgctccctgacggcccagtattttgccgccaaggcagccacgggggcagccacctccctgcgcaacgacctgttttcccatataggaagattgtcctacacagagatagacacagtgggcacggctgcgcttatcacgaggatgaccagcgacatcaatcaggtgcagagcggtatcaacatgacgctgcgcctgctgctgcgatcaccctttgtggtatttggcgccatggtcatggcctttaccgtggacgtgcgctcggcctttgttttcgcagtcaccataccggtgctctgcgtggtggtgttcggcatcatggcagtcagcatgccgctctataaatccgtgcagagacagctggacaaggtgctgttaaccaccagggaaaacctgttgggggtccgggttatccgcgcctttaacaggcagaaaagcgagacggagaaatttgaccgggaaaacggaagtctggtcaggatgcaggtgtttgtgggaaagatatccgccctgttaaaccctgtgacctatgtcatcataaatatagccgtggtggcagtcatatgggtgggagctgaacaggtggacagcgcagtgcttacccagggcaaggtgattgccctggtgaattacatgtcccagattctggtggaactcataaagatggcaaacctgattatcattatatccaaggccgttgcctgcatgaaccgggtggacggcgtattccaggtggagagcagcattgaggacagaggaacgtccggaagacgggagcgcaagtcccaggctcccaaggtagagtttaaagaaatggaattcgtttatgcaggggccaaggagccggccttgcagggcatttccttccgtgccatggccggacagaccataggcgtcataggcggaaccggatccggaaagtccaccctggtgaatctgattcccagattttacgatgcagcctcagggcaggtgctggtggacgggacggatgtaaaggactaccctctggacgggctgagggagaaaatgggggtggttccgcagaagtccgtactctttaagggaacgctgcgcgacaacatgcgctggggaaaacaggatgcgtcggatgaggatatctatagggccctggatacggcccaggcacgggaattcgtggattccaagggcgagggcctggacctttacattgaccagggaggccataacctgtcggggggccagcgccagaggctgaccatagccagagccctggtgagaaagccggaaatactgattatggacgacagcgcttcggccctggattatgccacggacgccaggctgagaaaggccatacgggagaataccggggatatgaccgtattcattgtatcacagcgggcaactaccattaagggcgcggataccatcctggtgctggacgagggacgtctggccggcatgggcacccataaggagcttcttaaggactgccaggtatacagggagatctgtctgtcacagctttcaaaggaggaggtggaacgggatgagcagtaagaagggattggacaataaaaggagcagggagaccctgaaacgaattcttaaatatatcagccagtacaagtggagcgtcatcctgtctctgctcctggcctttatcacggtggcccttaccctgtacgtgcctatcctgacaggccgggccgtggaccatatagtttcagccgggcatgtggatttcgccgggttaaggggaatccttatgaggatactgggagcagtggctattacggccgtttcccagtggctcatgaaccatatcaacaacatcatcacctaccgggttgtgaaggatatccggaccagggctttcaaccatctggaggtgatgcctctaagctatatagatgtccacccatccggtgatattataagccggattatagcggacatagaccagttctcagagggccttctcatgggatttactcagctgtttacaggcgttctgaccatagcgggcacgctgctgttcatgctttccatccagcctgtcatcacggcggcggtggtggtgctgacgcctatatccctgtttgtggccagctttatcgccaaaaagacgtttgtgatgttccgcaagcagtcagagaccaggggcgagctgacctccctgaccgatgagatgctgggcaatatgaaggtggttcaggccttcggatatcaggaggaggcacacaagcggtttgaggagattaatacacgtctggccagatacagcctgagggcaacctttttctcatccataaccaacccggccacccggtttgtaaacagcctggtctatgctgccgtgggtatcacaggcgcctatggggctatccggggattcatcacagtgggacagctgaccagtttcctgagctatgccaaccaatacacaaagccctttaatgagatatcaggtgtggtgacagagctgcagaatgccctggcgtccgctgcccgcgtgtttgagctgattgatgagaaaaccatcatagaggacagggaggacgcaaaggtactgcgcgacgcaaagggcagcgtggagcttaagcaggtttgcttctcctatacgccggagaaaaagctgattgaggattttaacctttcggtacggcccggacagagggttgccatcgtaggaccgaccggctgcggcaagaccaccattatcaatctgctgatgcgtttttacgacgtggattccggagctatcaaggtggagagaaccgacatacgggatgtgaccagggagagcctgaggaccagctacggcatggtgcttcaggacacatggcttaagtcaggtaccatccgggacaacatttcctatggacatccggaagcatctgaggaagagatcatccgggcagccaggcaggctcacgcccatggatttatcatgcggatgccggatggatacgacaccgttatcagcgaggacggaggaaacctgtcccagggacagaaacagctgctctgcattgccagggtcatgctgtgccttccgcctatgcttatactggatgaggccacatcctccattgacaccaggacggagataaaggtgcagaaggccttcgcgcagatgatggagggcagaaccagctttattgtggctcacagactgtccaccatccgggaggcggatgtgattctggtcatgcgggacggtaagattgtggaaaagggtaagcatgaggagcttcttgggatgaatggtttttacgcggatatttacaatgcgcagtttgcgagagagtagtacgcagggaatgatgtgagagaagggggcgggcatatgggagacgggcatatgggagagggacagatgatgtctgaattgtatcaggagaatatgaagcggcagaacaaaaacaggagatggaaggacgggttggccttcctatgtatcctgctgggaagcctgattgtagctgtcaacatgaacacctttgtggagcagggagagctggtgccgggagggtttaccggtctggccaagctgattcagagaatcggcctcagcttctatgatgttcaaatatcattcacatttctgaatgtgctttttaacgcggttccggccgtgttcgcctaccggctggtgggaaagaaatttactatcctgtcctgtatctgcctgctgacagtgtcagttctggtggatgagctgccggtggttcccatcaccggggatatcctgctgatatcagtctttggcggtatcttaaacggcctggggatgagtctggtgctcaacagcagggcatgcggcgggggaacggacttcatcgccatgtcgctgtcggcaaaatacaaggtctccaccttcaactatatgcttttattcagtgcggttatcatactgatatcaggaaccattttcggaatggataaggcactatattccattattttccagttctgtaatactcaggttatcaataccttttacaagaaatataagaaaaagacgcttcttattgtgacggataacccggcggccgtgtccgcggacctgctggagctgaccaaccacagcagcacgattttaaagggcttcggctcctactcagccaataagaaatacctgatttatacggtgctctcggacagtgatgtgaggaaaatgaagaaacggataagggaacagtacccggatacctttgtgaacgttatcaattccagcgacgtggtagggaatttttacatacagcccctggagtgatcgctctctgggatgggctgcatcttaatggaatctttagctgacattttcccaatctttatgtataatagtccttgaaacaaatcaatctatgtaatatgaaggaggaatcatttaccatggaatctgaccctgaagcggccaatattttattccaaatcacaatcttagtcatcctgacattaatcaatgcattctttgcaggctcggagatggctgtggtatctgtcaacaagaacaagatccaccgcctgtccgagcagggcagcaaaaacgcagcgctcatagagcgtctgatgaaggactcaacgatattcctgtccaccatccaggtggctatcaccctggcgggttttttctccagtgcgtcggcggctaccggtatcgcccaggtgctggcggtgcggatggcccagtggaacgtaccctacagccagaccctggcaggagttgcggtgaccatcatcctggcttattttaacctggtgttcggtgagctggtgcctaagcggattgccctgcagaaagcggaggccttcagcctgttctgcgtacgacccatttattatatatcacgtatcatgaatccctttataaagctgctttcactgtccaccagcggcttcctgaagctgattggcatgcacaatgagaacctggagacagatgtgtccgaggaagaaatcaagtccatgctggagacgggaagcgaggcaggcgtgttcaatgacattgagaaggagatgattacgtcaatattttcctttgatgataagagggccaaggaagtgatggtgcccagacaggatatggtggccctggatatcaatgagccccttgaggaattcctggatgagattctggaatccatgcattccaagattcctgtgtacgaaggggagattgacaacatcataggcgttttgtccacaaaggcgctgaccattgaggccaggaggacttcctttgataaactggatgtccgcgctcttttaaagccggcctgttttgtgccggagaaccgcagaacagacgccctgttccgggagatgcaggcaaataagattaaactggcgattctgattgacgaatacggcggcgtgtccggcatggtgactctggaggatctgattgaggagatcgtgggtgatatccatgaggaatacgaggaggaggagccggagcttacggagttggagcctcataaggtttaccgggtgtcaggcggcattaccctgtttgatttgaaggaggaaatgcatctgcatatggacagctcctgtgataccttgtccgggtacttaatggaacaactggggtatataccgtcccgggaacagcttcccctgacagtggttacaccggaagctgattatgagatattggaaatggaagacagagtcatagaatgggtgaagctgacccttaaggagacaaagaaagaacaggaagaatgatgtacagggcatggtacaaaggagggaaagtgaatgagttttctgttggaaggcattacggcggtaacctggcagcaggcagtcatgtatgtggtgggaattatcctgatttggctggcggttaagaaggaatatgagccttcgcttcttctgcctctgggctttggcgccatactggtaaacctgccgtattccggcgtggtggaccagatggtacagggaaagatacctgcggccggaatcatagaatggctgttcaagacaggtatcgaggcctcggaggccatgccaatcctgctttttatcggaattggcgccatgattgatttcggaccattgttgagccagccggtactgtttttgttcggggcggcggcccagttcggaatctttgcagccatcctcattgcgtgtcttatggggtttgatctgagggatgccgcctcaatcggcatcattggagctgcggacggacccacctccatcctggtatcccaggttctggggtccgggtacatcggccccatagcggtggcggcctattcctatatggccctggttcccattatccagccctttgccatacggctggtgaccaccaggaaggagcgccgcatccatatggagtataatcccaagagtgtgaataaacagctgcgcattgcatttcccatcgccgtgactatcatagtgggcctgatatcaccccagtccgtggccctggtgggcttcctcatgttcggaaacttacttcgggaatgcggcgtcctgggaagcctgagccagacggcccagaatgagtttgccaatataattaccctgctcctgggcatcaccatctcgttcagcatgagggcggagcagttcgtgaacccggccacattgatgattatggtcctgggtctggtggcctttgtattcgacaccgccggcggcgtgctttttgccaagctgataaatgtattcctcaagatggcgggtaagaaaccagtgaatcccatgattggaggctgcggcatatccgcattccccatgtcctccagggtggtacagaagatggctgccagggaggagccgggcaatatcatactgatgcaggctgccggcaccaatgtatcaggccaggtggcatcggttattgccggcggactggtcatcagcatcgtgtcccagtatctgtagggcggcaaaaatgaagtttcaaacaggctctggagccggcagcaaaggaggaggcgtatgaatatggaacacgtagggattgccctggaaattatgggaaaaggcatgggcggaatctttgcggccattatcatcatcatggccgcggtgatggtattgggccgaataacgaaggaccataaggacgataaagaatagttgtccgggagaagagaatatttcaagtagagatattgcagaatggattaagaaagaaaatagctcaaatgattacagttgcggcaacaaaagattttgatactgcaatcatactcacaaaagactacttaaaacaacttcaacaggaacgcaatcatgctgaggaagcgattgagattgtaaaaacaattttggcgggggaatgaaagtgaaaacacacaatgtctgaaacgtaaggaagtatcggaaatccttgagatttctatggacgctctgagaaattgggaaatgaatggcttgcttaccgtcaagcgaaaagataacgggtatcgtgtatatacggatggggatatacagcgtctaaaaattattcgttcattaagatgtgcaaactattctttagaagcaatcttacgattgctgcaacaattatccaaaaatcccgatacagatattcgtgttgcgctgaacacaccaaaacagacagatgatattatttctgtctgcgacaggttaatcgtatctcttttatcagcggaaagaaatgcaaacactcttttacaaatgcttaaagaaatgcagataaaatttttataaccctacactttgccaccaatgttcccattggtggtattcttttttcacgaaaacaaaggaggtcttaactatgcaaactgcaatcaaagtagagcagttgtcaaaagcctatgaaaatctgcttgcagtagacaaaatcaatctgtccgtcaagtgtggcactgtttacgggcttcttggtgcaaacggtgcggggaaaggcacaacgatagaatgtattttaggcacaaaaaatgctgatagtggaacagtgtccgtattgaactgcaatccccaaaaagatagatgccgcctgttccaaaaagttggtgtccaatttcaagagggagattatcagccggaaattaaagtatcagagttatgcggggaaaccgcctgcctgtatgaagccctcgcggattggaaaagcctttgcgaacaatttggcataggcagcaagattggtaatgcagtaaaaagtctgtccggcggcgagcgtcaacggttatttatcgtgcttgccttaattcctaacccgaagttggtattccttgatgaacttactaccggactggacgcaaaagcccgtcgtgacgtttggaaaatcctgcaagagctgaaacatggaggattgactatttttttaacctctcactttatggacgaggtagaaatcttatgtgacgagatttgtattttgaaacagggaaaagcagtattttacggaacggttgaacaggcaaaagaagtaagcggctgcaaaaagtttgaggacgcttatctcatgctttccggtgaggaggttggagaatgaaatcattcttgatacttttgaaaaatgaattaaaacttaatatccgaaatatgaatatggttatttttgctgtcattatgccgcttattgtcttagttattcttggctttatttacggaacaaaacccgccgtagagggaacggcatacacctttatggaacagtctttcggcgcgctctgctgcatttccatttgcgcgggtgggcttatggggctgccccttgtggtttcggaatatcgggaacgaaagattttgaagcgttttcaagttacccctgtcagtcctacaaaattacttgctgttgaatttgcaatttacatgatatattgtgttgtatcaattctgacccttttccctgtcgctatgctgttttggaaaatcaaaatacatggttcttttctcttgtttttgggaagttggtttttgactatggtatcaacgttaagcattggtctgttagttgggggaattgctaaaaacatgaaaagtgcaagtgtgattgcctgtattttgtatttccccatgcttattttttcaggggcaacacttccttttgaagttatgccatctgccatgcagaagattatcagcatttttcctttaacacagggcattcagttaatgaaagcgacgtttcttgggttgtcagttgacaacgcattgcttccggttgttgttatgtgcgctgttacaataatctgttttggtatttccataaaatatttcaagtgggaataaaaatacacctataaataaatataaaaatctgccggacgacggcaaaagaaaagaaccgtcgtcacgcagatgttttgtcatgctgtttttttagaagcggcggttttgagaaatcagagccgccgtttcattttggaataattttgattgttaacggcggcatcaaggaggtattgccgttttgctgttatatatttattcacagctgcgaggcaatggctgcttatacattaaagcggaacagcacaacgtcgccatccctcatgacgtattccttgccctcggaacgtaccaggcccttttccttggccgcattcatgctgccgcaggccatcaggtcgtcgtagttgactacctcggcgcggatgaatccacgctcaaagtcgctgtgaatctttcctgctgcctggggtgccttggttcccaccttgatggtccatgcacggctctcctggggacctgctgtcaggtagctcataaggcccaggatgcggtagctggccgcaatcagtttctccagaccggactctgtaaggcccaggtcgtctaagaacatctttttctcatcgtcatccagttcagcgatttcctgttcaatctcagcgcagataacaaatacttcacagttgttctcgtcggcaaatccccggactgactggacatactggttgtccgcgccgtcgtctgcaaggtcatcctcggccacattggcagcaaagatcacgggtttccatgtaagaaggttcagggtattgatgaactccctggcatcatcgtcatccggctcaaagctgcgggccagctttccgtcttccaggtgggccttgatggcttttaacagctccacttcctttgccagatccttgttgttgaacgcacccttggactgcttggcaatgcgtcgctccaaaatctcaatgtcggagaaaatcagctccagattaatggtctcaatgtcgcggagggggtcaatgcagccgtccacatgaatcacattgggatcgtcaaaacagcgtaccacatgtacaatggcgtccacctcacggatgttggacaggaactggttgcccagaccttcacctttggaagcgccctttaccagacctgcaatgtccacgaattcgatgacagctggggtggtcttttctgagttgtacatggcggtaagtttgtccagacggacgtcgggaaccggaaccacgcctacgttggggtcaatggtacagaacgggtagttggctgattccgcacctgcctttgtcaaggaattgaagagggtactcttgccgacgttggggagtcctacgatacctaatttcatatgattaccttcctatctgtatgtgttatatgatggttcaaatacgcccgggctttgggcggggacgttctgattctattacagctttattatcatatcataaaaaggggggaaattaaaggggaaaatgtgagtgggttatgggggtgaggggacgcggacggggcgggggattgggaaaatgaacggacgggggcggggagatttggctcatggttccctcgggtgctgtctctaagccgtaaccggggacaaagcaggggaacagtggcaaattccggagaaatcttgatgatttctcctccatgtgccatcggcttcgggccgtgtaggccctcagccgcccactgctttgcccccggttacggctaagtgacagttgcccctcggaaaaaatcgccaaatctccccgcttccgtctgttcattttccggctgctctttccctcgtccgctgacacatcctcccataaggagagaagagggatgagttgaatgtaaggatgaatatataatgtgagattttttctccgtcacataaggggccgatggaagggaatatgggaagagaggaggtgataggaacaggcaatgacattgtatatagtcatagcacaatgacatgacataaggacatggtgtaaggatatggcatagagatatggtacaaggatatagtataagggcatagtacaaggacatagtaagagaacatagtaagagaacatagcccaaggatgtggtgtggtggaaagggaacttttgaatacatgaagaattttctcatgaaaatattacatatgatatatgtatttggcagaggagtgaatggtaataaggaggagttttctcatattgaaagcgatacggatttataggttatcagaaatgagaagaactttgaaagcgagattttttcttcgccaattaagaagggcgttgacatatactgagagacaaataactgtttgatgaatttgttagataaggcttgtcaatttagataggattccttcttaatatataatacatagggcatcagctgttctccgaacttactaaaaaagatggaaacgatggtacatgatgagtgaggcgggttgattgataatattggcttttctggcaataatagtcatgattgtatttttaaatacaggccacatgatgtttagttgagtgtttaaatatttaagtatttatgcatttaagtatttcggcagtcaggtgagatttgaaatttcaggatagcaggaggttattagatatggaagaaacaattgtcgttatcggggccaaccatggggggacggcggttttgaatacgatattggaccagtttccggggaaaagagtggtggcgtttgacaggaactcaaatatcagttttctggggtgcggtatggcgctttggattggcgggcagatttcagggccagaggggttgttctattccagtaaggaggcttttgaggaaaagggcgctgtcattcatatggagacagaggttaccagaattgattttgacgggaaggttgtatatgccaggggaaagggcggggaggactttgtgcaggagtatgataaactgattctggctaccgggtctgttccgctgcgccctgagattgaggggatggagctggataatgtgcagtttgtgaagctgtatcagaatgccagggatgtaattgaaaagcttaaggatacttctgttaaaaaagtggccgtggtgggcgccggatatataggtgtggaactggctgaggcgtttaagaggaatggccgggaggtggttttgattgatctggcggatacatgcctgtcgggatactatgacagggagttttccgacaggatggcgcataatctgcaggagcacggcgtgaagctggcttttggtgagaaggtggtgagactggagggcggcagacgggtggaacgggtggttacggaccaggggtgttatgaggcggatatggtggtgttcggcattgggtttaagcctaacacagcccttggacagggaaagctcaggacttttggaaatggggcattcctggtggaccgcaggcaggagacaagcgtacctggggtgtatgcggtgggggactgcgctacggtttacaacaatgccatacaggccgcggattatattgccctggctaccaacgcggtgcgctccggaatcatcgcggcccataacgcgtgcggtaaggttctggaatccgtgggagttcagggctccaatggaatcagcatatggggatttcatatgctcagcacgggaatcagtctggccagggcggagcggatggggtatgacgcggcggcggctgattatgaggactggcagaaggctgagtttatggagaacggaaaccataaggtgaagatacgcattgtatatgacaggaaatccaggatcatattgggagcccagatgtgctcggattatgatgtttccatgggcattcacatgttctccatggcagtggaggaacaggtgaccatagataagctgaagctgtttgatttgttcttccttccacattttaataagccctataactatgtgactatggcggcgctgggggctgagtaagatggattccgggaaccggatgaaattgggaaccggaatggggccggcaaacaggggggattggggctggtaaataccttcttgctttttatactgcttcggggtaaaatgggaaagtatatcactaaggaaggagatttttctttatggaagcagttacgggagcggatttgagttttgtgaatctgggcattaccatagagcatctgcctaacagtatcactgtgtttgggttcaggattgcgttttacggtatcatcatagggcttgggatactggccggcatggccattgcgtgctcagacgccaagagaagagggcaggacccggatatttatctggattttgcgctttacgccattatattctccatcatgggggccagggcctactatgttattttcgactgggctaattataaggatgatttgctgcagatatttaacctcagggcaggcggactggctatttacgggggtgtcattgcggcggccctgacccttatcgtatttactaagaaaaggaagctgtcctttttctccatggctgacagcggcgtcctgggcctgattacaggacagatgatcggcaggtgggggaatttcttcaactgtgaagccttcggcgggtatacggataacctgtttgccatgcgaatccggaaaagcctggtgaatcccgccatgatatcccagcagcttgtggacaatgagattgtggagaatgggatggcctatatccaggtgcatcccaccttcctgtatgaatccctttggaacctgggcgtgctgatgttcatgctgtggtacaggaagcgtaagaagtttgaaggggagatgctgtgggtgtatttctttgggtacggactgggaagggtttggattgaaggtctgaggacggaccagttaaggattccgggaacggaatttgccgtgtcgcagcttttatcggctgtgctgttgggcgtgtcggcggcagtgattgtttaccgccatcgtcacccgaaaaagggggacaaagtggaggaatccgcctaagatacgcactcatcccccacttttgggaaatcggcaggaaagtggtggtgaaaatcatgggattgtcccccaccaggggcatgaaaggctggaaaaatcaatattttgtgtctgctgcgggactcgtcccacatatagaggcagttgcggaaaagcccgcagctgccttattttttcgcaatttttttatgagatttccgtaaaaacttcttgccatttcccaaaatctgtactatgatggacatacaagtggtagaaagtggtgcaaagtggtagaagatggttgttaagtggatgaagtgggggatttcggatgtctcccacaatcctccactaccgctccggtgtacggcaggtgataagttatgttcatgggtgagtacaatcatacagtcgatgcgaagggacggcttatcgtaccttccaaattcagagagcagttaggcgatgaattcgttgttacgaagggccttgataactgcctttttgtgtatgagaattcagaatgggctgcccttgaagaaaagcttcgcacactgccccttaccaatgccgccggacgtaagttttcacgtttcctcttagcaggagctaccacctgtgaagtagacaagcagggaaggattctccttccggctgttcttcgggagtttgccggaatcgagaaggatgctgtactggtaggtgtgggcagccgcattgaaatatggagtaaggataagtggctggatgcaaacacctttgatgatatggaagagattgcagaacatatggaaggtttgggaatttaatggaggaatcaacatttgtacataagtccgtacttttatatgagacagtgggaagtctgaatatcaagccgggaggtttgtatgtggacggcaccctgggcggcggcggacatgcctatgaggtgtgtaagcgtttgggcagcggtaagctgattggcatagaccaggacgcggacgccatagaggcggccgggaaacggcttctgccgtttcaggacaaggcgaccattgtcagaagcaattacgccaatattaaggaagtactgaaggatttggagattgaaggagtggatgggatttatctggatctgggagtatcctcctatcagctggatacggcttccaggggatttacctaccgtgaggacgcgcctctcgacatgagaatggaccagaggaacgatgtcacggccgcccatatcattaatacctacagcgagatggagctgtacaggattatccgggattacggagaggataattttgcaaagaacatagcaaagcacattgtaagggcaagaggagaacaccccatagagactaccggggagctggcggagatcataaagggagccattccggccagggtaagggcaacgggaggccatccggccaaacggacctttcaggccatccggattgagtgtaaccatgaactggaggttttagagcagtccattgataccatgatagaccttctgaatccgggaggccgtctcagtatcattaccttccattccctggaagacaggattgtgaagaaccggttccggttaaatgagaatccctgtatctgtcctcctgattttcctgtctgtgtgtgcggacgaaagagcaaagggaaagtggtgtccagaaaacccatattgccgtcagatgaagaactggaggaaaacagccgctctaaaagcgcaaagctgcgcgtctttgagcggggacagtcttagtcagaagacaagacctttttccggtcattgagattacgaaagacagcaggcagcaggaaagaccggccggtgccggctgccggattcagacagaagggaggataaggttatggctgcaagggcgcaggcgtcgtcaggacgcaggaatacacgtagaaataccagacccatgtacggcaatgattatgtacagggttctgccgcaccaaagctaaggccccagagcgctccaaagcaggagaccaggcaggggaaaccatcaggcagccagtcggtccggagtaatcaccggatccgccgcaatcaggagcgtgccatgtatatggaccttccatatgtcatcatgcttaccattgcgtctgtatttaccttatacctctgtatcaactacctccatgtgcagtcctccatcacggccaggatgcaccatattgagcagatggaggcagagctggaacagcttaaggcggagaacgacgccctggagaccagcatcaataccagcatcgacctcaacaagatatatgagattgccaccaaggagctgggaatggtgtatgccaagaaggaccaggtgctgttatatgacaagacagaaagcgagtatgtaagacagtatgaagacatcccagaacactaaatccgggggccgtatggggaaaggcagcagcggcagcaggaaggacagcacgaacggccccagggatcaggaacagtacagaaatgaacaacggaacaatcaacgggggaagtattattatcccaagtatattcaagagaagctggcaatcaccgtcctggtgattacgctggctttatttgcattagtcatgattttgtaccggatcataaaggacaacaacgagcagtacaataaaatcgtgctctcccagcgccagcaggagtatgacagccgtatcatcccgtaccgccggggagacattgtggacaggaacggcacctatctggctaccagcgagaaggtttacaatctgattattgatccgggccagatcatgtcggacccggaaaactatctggaacccacgatacaggccctggtcaccaactttggttttgacgcgggggaactgcggaccctgattgaggagcggcgggaatcagcctatctcagatacaataagggacgccagctcacctatgaccagagggtggcctttgaacagatggcaaaagagacaaatgaagcctaccgcaggagcgataacgacgcggaggctaagaagcgggttaagggtatttggtttgaggatgaatacaagcgtatttatccctataattccctggcctgcaatgtcataggctttaccagcagcgacggaagcgtgggtaccggaggcattgagcagtattataacagcagcctgatcggagtaaacggacgtgaatacggatacctggaccaggattctaatttggagggcgtggtgaagccggccgtgggcggtaatactgtggtctctaccattgatgtgaacatccagaacattgtccagaaatatattgacgagtggcagaccaatgtgggaagcaaggtcacggctgccattgtcatgaatcccaacaacggggagattctggccatgggaaccagcaataaattcgatctgaataatcccagggacgtatccggctatacggagcaggatttgtttgacctggggaaaaaggaggcagtggctgtgtaccggcgggaaaatgacggcgcggtcattaccgaggaccaggtgctggagcatttttccagggaagatgtgatttcctacgggcagcaggtggcgtggaaccagatatggaggaatttctgcgtcagcgatacctatgaaccgggttcgccttccaagatatttaccgtggccaccggcctggaggaaggggtgcttaagggaaatgaaagctttgagtgtaccggttacctccatgtgggagacaatgatatcaagtgtacggcctggcgcaggggcggccatggatggctgaacctccaggaatccctgatgcagtcctgcaatgtggccatgatgcgcattggagccatgataggaagagagcgttttaccaaatatcagggcatctttgggtttggcgacaagacaggcattgacctgccaggcgaggcggacaccagcggactggtttacagcgcggacaacatcgggcctacggacctggcgaccaatgcctttggacagaactacaactgtaccatggtgcagctgtcagcggccttctgctctgtcttaaacggcggttcctactatgaacctcatgtggtgaagcagattctcaatgaacaggggtctgtggtggagaaaaaagagcctgtgctggtgcgggagaccgtatcccagtccacctctgatttcctgaaggaggccatgttccagacggttgaggcaggtacgggaaaggcggcccaggtcattggctacgatgtgggcggcaagacgggtacggctgagaagcagccccgaagcgccaagaattatctggtatcctttgccgggttcgcgcccattgaggatccccaggtgttcgtgtacgtggtcattgacacgccaaattatccgccgggagagcagcaggctcacagttcctatgcaagcgctgttttctccaaaatcatgacagaaatacttccttatttaaacatattccccaccaaggacctccccgaaaatgaggcgctccaggagagtctgccgtcctcagagggcattaatgagccggctacagaggcggaaggcgcagagggaaccgaggagactccggctgagacagagaagcagtatgagacagatgaatacatgccgggcggggatgaaggggagggcgcgggcagcggcgtgccggatgcagtacccaccgcggctgaggacgggagcggagcgggaacaggtcccgaatcccttcccgcgcaggccccgccccgcagacccaatgaaagcagcggccaggcaggtcccggccgggaaagcagccaggcagcagaaccttccgcagcggaggaaactgccgggcagtctgagtaatcaggagaaagattcataaaatgtgacgggctccaatatattattaacaatgatggacaccggagctgctcatgtattctaatttaacgaaacacagaaagaatatagccgtcctggcactgctcatagccattgtcatggtgagcctgtcaggacggcttggctttcttatgctgttctgctccgagcactacagcgccatggcggaggaccttcaccagagggagcgtaccattaaggcggccagagggcttattattgacgccaatggggtggttattgcggataacaggacggtgtgtaccatttccgttatatacaatcaggtaaaggaccgggaacaggtcatacgggtactgtgtgatgaactggacctggatgaggaactggtgagaaaacgggtggagaaacgcagttcaagggaaatcatcaagaccaatgtggacaaagagctgggggaccagatacggtcctaccggctggcgggcgtcaaggtggatgaggactacaaacggtattatccctacgacagtctggcttccaaggtcctggggtttaccgggggagacaaccagggtatcatcggcctggaagtaaagtacgagaaatatctgaaagggatgaacggaaagatactcaccatgtccgacgccaaaggcgtggagatagagaatgccgcagaggacaggattgaacccataccgggtaatgaccttcacatcagcctggatgtgaatatacagaaatacgcggagcagctggcctaccaggtgctggagaagaaaaatgccaaaaaggtatccatcattgtcatgaatccacagaacggagagctgatggccatggtcaatgtgccggagtttaatctgaacgatcccttcacactgaaccagaaccttcgaagccagagcctccaggagatggctgccgggaaccagggggccacgggagccggcaaacaggagctgttaaaccagatgtggaggaatacctgcatcaatgatacctatgagcctggttccaccttcaaaatcatcacggcggcagccggtctggaatccggcgtggtaaagctgacagaccagttctcctgccccggattcagggtggtggaggaccggaagataaggtgccataaagtgggggggcacggggccgaaacctttctgcagggagccatgaactcctgcaacccggtgttcattgatgtggggcagcgcctgggcgtggatggctattacaagtattttacccagttcggtctgaagggaaagacgggaatcgacctgcccggcgaggcagccaccatcatgcacaaaaaagaaaacatggggctggtggagctggccacggtttcctttggacagtccttccagattacccccgtccagcttattactacggcagcctccattgtcaacggagggaaccgggtaacccctcatttcggcgtggagaccgtgagcgccgacggtacatcggtccataagctggattatccctccggaggaagaatcctgtcagaggagaccagcgccaccatgcggtatgtgctggagcaggtggtatcggagggaagcggcaagaaggcaaagttagagggataccgcataggcggcaaaacagccacgtcggagaagcttccgcgaagccttaaaaaatatatttcgtcctttatcggctttgctccggccgacaatccgcaggttatggcgctcattaccattgatgagccggaagggatttattacggcggaaccatagctgccccggtggtcggagatttatttaagaatatacttccttatctgggaattgaggcagtacaggaagaaactgctgtgcacctttccaatccatagttgattattcccggaaaaagacgtatactaattaccaaataagacatacatatgagattgaggtgcctttatgattcatgaaaccatactagctattatcattgcatttgccatcagcgcattgctttgccccattatcatccccttcctgcacaagcttaaattcgggcagcaggtcagggacgaaggaccacagagccatctgaaaaaacagggaacgcctaccatgggcggcctgattatactcagcagcatcatcattacatctgtcttttatatccccggttatcctaaaatcattcccgtgctgtttgttacggtaggatttggcattatcggttttctggatgattatatcaagattgtgatgaagcgctccgaggggctgaagcccatgcagaagttagtgggccagttcatcatcacaggcatcttcgcctggtacctgcttaacagcggggaagtgggtacggatatgctgattccttttacgggcggttttgacgggggcagcttcctgtctctgggaattttctttgttcccgcactgttcttcatcatgctgggtacggataacggagtgaattttacagacggcctggatggtctctgtacaagcgtcaccatactggttgccacctttcttaccattgtggccatcggcgaggacatgggcatcagccccataacgggagcggtggtgggaagcctgctgggatttttgctgttcaatgtatatccggccaaggtgttcatgggcgataccggttccctggccctgggcggctttgtggctgcttcctgctacatgatgcgcatgcctttgtttattcccatcataggactcatctatttggttgaggtgctgtccgtcatcatccaggtgacctattttaagcgcaccggcggcaagcgtatttttaaaatggcgcccatccaccaccattttgagctgtgcggatggtcggagacaagggtggtggctgtattcgccatcgtgactgccatcctctgcatggtggcttacctggggctgtagatattagtatcgcacgtaagagaccaaaatacggtctctgagtgttcataacgaggaggttagttgacaaatgaaccaaagtcagagagttttagtggctggaacgggaatcagcggcattgccgctgcgaagctggttctggaacggggcggcgatgtggtgctttatgacggcaatgccgccttgaaggaagaagatatcaaagagaaatttgacaggggtgcaaaggtaaacgtggtcctgggggagatcaagcgttccgacctgctgggagtggagctgtgtattatcagccccggtattcctcttgacagtccttttgtggccgtggtggacgatgccaagattcccattctgggagagattgagctggcctaccagtgcggcctggggaagctggccgccattacgggaaccaacggaaagaccactaccacagcccttacaggggagatattaaaggcccgctatgaggagacatttgtggtgggaaatattggcgatccctacacctccaaggttttggagatgactgaggattccgtgaccgtggcagaggtgtccagcttccagctggagaccatcatggattttaagccaaatgtcagcgcgattttaaacatcacgccggaccatctgaaccggcatggcaccatggaaaactatatccgcatcaaggagtgcattaccctgaaccagacaaaggaggatgcggtggtgctcaactacgacgattctgtcctcagggagtttggccagaatccggagcttaagcccagggttatctggttctccggcagggaaaccttaaaggacggtttctgcatggacggggataatatcgtgtactgccggaacggccgtcagaccgttgtggtcaatgttcatgacatgcagcttctgggacgccataattatgagaatgccatggcggcggcagccattgccctggagatgggggttcccatgtctgacattacaagggtcattgagggctttcatccggtggagcacagaatcgagttcgtaagggagcgcaccggggtcaggtattataacgattccaagggaaccaacccggatgccgccatccaggctctcagggccatgccgggccccacccttctcattgcgggaggctatgataagaacagcgagtatgatgagtgggtgtccgagtttgagggcaaggtgagatatctggtgctcataggacagaccagggataagatcgcggagtgtgctaagaagcatggtttcacggaaatcatgtatgcggaagatatgcaggaggcagtgcaggtatgcgccgtgtatgcggacatcggagattatgtactgttaagccccgcctgcgccagctggggtatgtttaaaaattatgaagagcggggacgcgtctttaaggagtgcgtcatggctttgtaggaggtaaatgcgtatggcgggaaaggtgcagacggcagccggaccctctggccagatgagacggccggccgggaacggggaccgggtggagcagcagatgccaaagaaaaagaagaaggcaaagcgtttttatgattacagccttttgttctgcatcattttcctgacagccttcgggctggtaatgatttacagcgccagttcctattcagcgcagctgagtaaggcatataacggaaacggtgcatatttcatgcagaggcaggcgggaatcgcggcggtgggactggtggccatgctcatcatttccaagatagattatcatatatttgccaggttctccgtgtttgcctatctcatgtcatacatacttatgattgcggtgagcctgtttggccgtgaggtcaacggcaagaaacgctggctgggagtggggtcattaagcttccagcccacggagtttgtcaagatagccctgatcgtgcttctggctgcggtgattaccaccatgggaatgaagattaataaatggaaaaatatgggatatatagtggctctgaccctgcccatagcaggcctggtagccatgaacaacttaagctccggcatcattgtctgcgggatcgcttttgtcatgctgttcgtgtcctgtaaggtgaaatggccttttttctccatcggtgccctgggactcaccactttggcctttgccgggcccattggcaaatttctgaccacggtgggacttctgcagccgtatcagtaccggcgaatcgaggcgtggctcaatccggaatccgaccctacggacaagggattccaggttctccagggactctatgccattggatccggcggactggtgggccaggggctgggggagagcatacagaagctgggctttttgccggagtcccagaacgatatgatatttgccattatatgcgaggagctggggctgtttggggctgtgtccattatcctcatattcctgttcatgatctacaggtttatgattatagccaataatgcccctgatttgttcggggccctgctggtggtgggcgtcatgggacacattgccattcaggttatcctgaatatagcggtggtgaccaacaccattcccaatacgggaatcacccttccatttatcagttacgggggaacgtcggtgctgttccttttgatggaaatgggaatcgtcctgagcgtgtccaaccagataaaacttgaaaagtaacagcaagaataccgcacaagcgggcacgtcccggcatatgctttaagtagaaggtgttttctacggaaggcatagataccaggaggtgccccattgtctgtcattcaggtttgtggtcttactcccttaaagggagagatatccatacaaggttctaaaaacgccgtactgcccatgatggctgcggctttacttcacagaggggttacggtgctgaccaatgtcccggtcatacgggatgtgacctgtatgctggacatactggaaagcctgggctgccggtgctgccgcaagggggactgccttgtgatggatgcccgcggcgtcacggggacatccatccccgaagagtacgtcactgccatgcgttcctccatcgtggtgctgagcgccctgttaggacgtatgggagagggcagcagctgttatccgggcggatgtctcataggggccaggcccattgacctgcatctgatggcgctgagggccctgggagccgatatcagggaacgggacgggaccatagaggccagctgcaggaggaaaggcggccttaagggcgcggaaatccacctgtcctatccaagcgtgggggccacggaacaggccatactggcttctgtcctggcagagggggtgaccatcatccgccaggctgccagggaaccggaaatcagccagctgtgccgcttcctcaataatatgggggctgttatctgcggcatgggaacagaccatctgatggtgcagggagtggccgggcttcatgacagcagcttccgggtggagggagacaggattgtggccggcacctatggagccgccgcagtggcggctggaggagaggtccttttacggggcatttgcccgtctgatcttaaggtgcctttggaggaatttcaaaaggccggcgcagcggtggatgctgatgaagaaaactgccagattcggatatgtatgaggaaacgtccccttccccttcttattaaaacagagccatatcccggatttcccacggatttgcagtcgccctttatggcatttctggccactgccctgggaaccagttatatagaggagcaggtctttgagggaagatttgcaacggcaaaaatcctggagcagatgggtgctgtcatacgcacggagaaccagagagccgtgattgaggggcattatcccctgaagggagctgccgtcaatgcctgtgacttaagaggcggggcagccctgatggtggcggccctggctgcggagggggacacattcatcggggaatgccatcacattgagcgggggtacgaggacatatgcagggatatggcagctttgggcgcccatatccgctgggtggagaatgattttaccaggtgaggtactgtatgagaaattatggtagtaaacatcacataggggcaggtattgccgtggcagtggtgctgcttctggcaatcctgcttttgtctgtacagattcagaatgtgacggtgactggaagcgacaggtattccgccaaacaggtggaagaccttctgttcaccggcaggtgggggaaaaattcggcccacgcttatttttcggacaggttccgcccccacatccagattccttttgtggaggattataaaattgtattccacaatccgtttaacgtggaggtgatcatatatgagaagagtattgtgggatacgtgtcctacatgagcagcttcatgtattttgacaaggacggcattgtggtggaaagttcgggaagccagctgcccggcgttccgtggattacaggcatggaattcggcagaattatactgcaccgcccccttccggtggatgataagaacatttttgaggagatactgaacctgacacagcagctgtcagtctatgatattgccgtggaccgcatccagtatgattcccacggacaggccaccctgttcatcggaaagatggaggttaccatgggagatcacacggatattgacggaaagatatccacgctcaacgatatcctcaaggcccagccccagcttacccaaatcagcgggaccatgaaactggacaactattcggagtccaacagcggggcggggattacatttaaaaagaagtgatttgctattaattaaggaagaaagtcaaaaaataagctctttccggttaacgttttcctttcttaggcatttatttatgtcttagaaaatagtggcatgaatcaggtgttgtaaagtaagccggaatttggtacaatgtccatgaatgtttctaaaaatattaggaaatgtaaaaaaggtgttgatattttttgtgaaatcaaatatagtattagttagaccagaaatcgatgagaaattgatattgatgatagaatgaaagcatggcttgaaatggtagtaagggaataaaaggaggatatggatcttgttagagattaagataaatgagtcagagaatgccgccaggattatagtcgtaggcgtgggcggcgcaggaaacaatgcagttaaccgcatgattgacgaaaacattgcaggggtggagtttattggcattaacactgataaacaggcccttcagttttgtaaagcccccactgccatgcagattggagagaagctgaccaagggactgggagcaggcgccaggcctgaggtgggagagaaggctgctgaggagagttcagaagagatttcacaggcattaaagggcgctgatatggtgttcgttacctgcggtatgggcggcggaaccggaaccggagcagctcctgtggttgctaagattgcaaaggatatggggattcttaccgtaggcgtggtgacaaagcccttccgttttgaggccaagacacgtatgagcaatgccctgtccggtatcgagcagctgaagaacagtgtggataccctgattgtgattcccaatgacaggcttcttgagattgtggacaggcgtaccaccatgccggatgcccttaagaaagccgatgaggtgcttcagcaggcggttcagggtattacggatttgattaatgttccaggtctgattaacctggattttgctgatgtccagactgtcatgattgacaagggcatcgcgcatatcggtatcggcaaggccaagggcgacgataaggccattgaggcggttaagcaggcagtatccagtcctctgttagaaactaccattgaaggcgcaagccatgtcatcatcaatatttccggcgatatcagcctgatcgaggccaatgaggctgccagctatgttcaggagctggccggcgatgaagcaaatattatttttggcgccatgtttgatgagaacgctcaggatgaggccaccatcactgtcattgccactggtttggacgagcatggagccaatgcttccgtggcaaaggccatgaccggctttaccagttttaagacaaaggtaccggcagcaggagctccggccggacagcaggcacatgcggcagcacctgaggcagcggcaaccgcgtccgcgccttacaccagcagaccggcatcccagggatatacgacccacggctataatccggccggaggcggccagggatacgcggcgcctaagtataaccccaaccaaggatatgccggcggcagtcagaattccaacccgaattccgcgactgcgccaagccagcctttcagaccggccactaataaggagatgcagatcaacattccggatttcctgaagaataaaagataggctttaaccatatttggatatttgttccggctgtcgtgagacagccggttttttcggttataggcaggttggcaccaataaaaaagaatgccgggacgatatctgttaaagtacgttccaacattcattatagattcatttcttagctattctccgctcttttcctgtaaatccagcagcagggccaccaaatcatccactgtcttttttgaacgttcgctgagcttcccataggaggccataaactcatgacaagtctcctggcctgcctgacatgtgtcacggacgggctctgtctccagaagaaagctgcctgtggtgttcagaatccgggccagctgcttcagcttcgccacatccggctggcgtttgcctgtttcgtatccgcagtaggtgctggctgtaaggcctaaggcgtccgcaacctgctgctgcgtgtatcccattgtatttctggctattttcagttgttcggaaaatcccattatcacacctcatttcagggcctatttttggttggcgaattgccaattttttgataaaattcattgacacagtggcaattcgctgatattataattatatgtttgcgattcgacaatatagataacaatacgccaaagacaggcagcctactgccgcttgcccagacgcagtttcagcgatttgactgtgtccagaagaaacagctgctcatcctccgacagctccttggctatgtcacagagctctttcagcagctttgcgctttggaaggcctgatttccggcttccatgtctcctgtgccgtcggtgagccattctttattaattttcagtacctggcagactgcattgatgacaatggcctgcggttctgtcttgtttttttccaggttgaagatgactcctctggatacgccgatggtctgggcaagggaatcctgggtatatcccttttgtttccgcgcatagttgagtcgttctcccaatgtattcattttatcacccccgcaatcagtatacaatgagcaaaattcattgtcaatgattttttggcggtgcgggtacagaaaaaatatagcacgtttcattgacagtgaattccttatctgctataattcattaatagagcaaaaagaaaggagggataacattgacaatgcaaaaggaagaagaacggcaaaatagggtattaaaggaaatcattgacaacgcaaaggagcttccggtggaaagccagaacctgctgcttatacttgccaggggaatggtgtttacgcgaaactgtatgatgcggcagaatgccgcggaccagccgcgcatgccgccggacaagcattctgcatgaattataaaactatataatgaaaaaggagagataaacgtatgaaaaaaagacttatatcactgtttctggcactgaccatgacatgggggcttacggcctgctcaggcggttcttccgccccggctacatcggctgccccggcctcggaccagggggaggcagaggattccaggacggaaaacaaagacacggatgccggcaggggcgcgcaggaccagggcgcgcaggcgggcaaggccgcctatacgctgaatatcggatctgccatgagctccaccaacccctccagtgttgccctccagagctttaagaaggcggtggaggagaggaccggaggcgatctggctgtaaacatctacacggactctgccctgggcggcgaggccgaccttttggaacaggtcacgtccggtacggtagagggaatgatgcagatgggcgcagccaactgggagccctataattcggaggtgaacgtggcccttctgccgttcctgttcacatccctggacaatgccagggatgcctgggccggtgagttcggacagcagttctgcgaaaagctcctggagccaacaggcgtgaccatcctgtctgtatgggaatccggttaccgccacatgaccaacaacaccaggcctatcctggctcccggagatattgcgggcatcaagttccgcaccaatgaaaacagcatgaaggtcaagatgtatgaggccgtgggaggctcggctgtcatcatggcattttccgatgtgtatacaggccttcagaacaagaccattgacggccaggagaatcctctggcaaacatctacacctcatccctccaggatgtgcagacttatctgtccctgaccggccatatgtatgatgctgctcctctggcagtcaacacagcatggtttgaaacccttccggaagaataccagatcatactgtttgaagaggctgaccatgcaagggaagcggacctgcgggaaaatgatgagtccaaatacctggaattactaaaagaggcaggtatggaaatcaatgaggtggataaggatgcgttccaggaggccatgtcgggcatctgggaggagtttgcttcccagtacaaggacggacagtattggatagaccttgccacttcctttaataaatagatatctgcggtaccggggtatggacccgtccatgccctggatccgccatagaatcgtttgccgcagaataatatgaaaaaggagggtaagaaatggttctgaaaataacggacaaggtaaaattccttctgcgcatcttaagctgtatcacggtgtgtaccctgaccatcatcataggaatacaggtggtgaaccggtatgtgtttggtacatcctttacatgggtggaggagctggccggcatggctatgatctacattacatatttcggcgcagccatggccaccgtcaataacagcaacacgcgaatcgacttctttatccgcaagcttcccggacctgtgtaccgcggttttgaaatcctggatgactgtatctgcgttgcgtttctcctggtaatctgccgctatgctgtaaaactggtgggcaccaatctccacgccctttccgcggccatgaagataccgcttgccgtcaactatgtaggtgtactgagcggatgtgtgctgatgattgttttttatttgctgcgtctctggattgatgtggagaagttccggggaagaaacatggattatgtggaggaggagctgagccgataatgaatactggattgattgttttgtttgttgtgttgggaatctgtctgctgattggattgcccgtggctttttccatcggaatcagttgtatggcactgctgaccgtcaatggttacccgcctctggacattgttgtccagcgcatggccagcggcgccaaatcctttaatatgatggcaatgcccatgtttatctttgccggttccctgatggtatacggcagtacgccccgccttatgaaatttgccaacatgatgctgcggaaaatgccgggcggactgggggccacggcgcttgcggcctgcggattcttcggcgctgtctcagggtccggcgtggcaagcgccgcggctatcggcaagatcataggtcctgagatgctggagcagaaatatccaagggggctgaccgtgggactgattgcggccggaggaaccatggcctgcatcattccgccaagcattgtaatggtggtttatgcgtcctcctccggggcgtcggtgggagatatgttcctggccggttttgtgccgggatttatctgtatcattgcccttatcggactcaatacctttttcgccgtcaaaaggggaaacaaggagagtgttgagaaaacagattatacggcaaaggagaggctcaagattacaggtgatgccctgcttcctcttttaatgcctattttcgtgctgggaggtgtattttcaggtatctgcaccgccacagaggcatcggtggtggctgtaatctattccttcattctggcagtgttcgtgtaccgggagctgacgctgcgggagttctataaggtggcggcggaaagcgttgtcaccacaggcgtcatcatgctgattatctcggttgccacgcctttcggatggattatgtccatacagaatgtgcctgccctgtttgccaactggctgctgtccattacatccagcaagtttttaatcatggcattcatattcctgcttcttttgctgttggggacctttatggagaccatgtgcatcatcattctggtgacgcccattcttctgcccatcgcccagacacttggaatgggagtggtccactatggggtttccatgctgatggcactgatggtaggctccctgaccccgcctctttctgtgaacctgtttacggcctgccgggtgctgaatgtaaagtatgacgaggcgtttccggataccctgtgggtcattctgacagtgacggcctgcgcccttctcacctttgcggtgccggaaatcacggagcttctgccggctgtcttaaagtaaggagaaccatatggatatggataaaaaggacatgctggaacgcgtggcaaaagctgcccgcagggcgtacatgaaaggatttgccgcaggaagcggcggcaatgtgagcatacggattcagggacaggtgtatatatctccaagtggaagctgcctgggggacctgacggcggaggacatgattatgcttgaggcggatggttttgtgccgcccgcaggcgggccggattacgggggccggcggccgtccaaggaggccgggatgcatctggcgtgctacaggagccgtcccgacatactgtgtctgtttcatctgcattccccctattccattgccgtggcctgccgcaggcaggaggacagaggtccggccatggggatgcctgcctacactccgggatacgccatgcgtgtgggaaggattcccgtggttccctattaccgtccgggaagcagggaactggctgaggctgtctccggggtgatatgcaggcgggacagccttctgctggcaaatcacggcatggtggctgcgggcaaaagcccggaggcagtgctggccgccgcggaggagatcgaggagaatgcgcatcttgccatacttttgggggaacagggaattccccttgacgaagagcagacagaggcgctgtttcaggccggaggaaaggtatgagggataaggacctattattagggatagacattggcaccaccggaacaaaatgctcggtatatgattttcgcgggatacgggtggcttctgcctaccgggaatatcccatgatccatccgcggccgggatggaccgaacaggacccttcccggtggtgggatacggtgtgctgtaacctgcagaccatatttaaaagccagaacatagataaaaacaggattgcggcggtgggaaccagcagcaccaacgcagtggtcctggtggaccggcagggacagcctgtgtgcaatgccatcagtctccacgaccagagaagcggtcaccaggtggaatggctgaaggagaatatcggggaggagcgtatccgcggtgtggcagcaaaccgcattgccaacggctccttctgccttccggccctgcggtggctggtcgagaaccaggcggatttgattaagggcgcgtataaactgatggtgccctgcggctatgtgattcaaaagctgacaggggagtttaccatgaaccggccgcgcatgagcctgactcttatggggaatatccgcaccggccaatgggatacggagatcgcaaaacagtcaggactgccgcccaggctgctgccgaggccctgcggctccactgaaatcgtgggaacggtgacggaatgggcggccttgatgacaggcctggcggcaggaacgccggttacaggcggaaccattgacacggtagcggccaccataggggcaggcgccgtggcggagggagatttctccctgaccataggaagcagcggaaggctgtgcagcattggggcgcggcctatggaggaccccaggctgctgaacatatgcggagcttatgacggacagtatatcattgtccagtccaccaacaatgcctgtgtgtccctgcgctggttcagggatacattcggaagagaggctgcccgggaagcacgggcagccgggtgcggtatatacccatatctggatcgcctggcggccgctgccccggcaggggcgggaggcctcatatggcttccctatctggcaggggagcagagccctgtctgggatacacaggccagaggcgtgttctatggagcagggctggagacggattacccgtcattcataagggctgtcctggagggggtggcattttcacagcgccactgcctggaggtggtcctggaccgggctgccaggccggatatcataccccttggaggcggcgcggccaacagccctctgtggtgccggatatttgccgatgtgctgggggtgcctgtggcccggctccggtccaatgagacagagaccctgggagatatcatcatcgctgcccaggcaatgggaatccaggagattgcgccggactttggaaaggtgctggcggcggagggcgaggtgttttggcccgatgatgtccgggcttctgtatatgacagacagtaccgggtttaccgggaactgtaccaggcgttaaagcctgtatttgcgggaggaggagagtgatgaaattatgttatcaggcggccacgcccgacgtggccatagcggattcggtgacagcataccaggggcctctggcaaaaacctttggggacctgggcgcccttggatacgacggggtagagctgatgaccctgaatccgggaaagctggactggggggaagtgaaggaaacagcagaggaaaacaacctgtccgtggtgctggtgtgcacaggcgagattttcggacagttgggcttaagctatacccatcccagccggtccgtgcgcagggaggccgtggagaggacaagggatatcattgattttgccggttacctgggggccaatgtaaatatagggaggatacggggacagtactgcggggaactggacagggaggaaacgagcggactggctcagagtgcgtttgctgagctggctgactatgcggcccctaaaaaggtggacattgccctggagacagtgaccatcatgcagaccaacttcgtcaataccctggcagagggagcggccatggtggaccgggtgggaagacccaattttcggctcatgatggatattttccacttgaatctggaggaaaaggatttgtatgaggccatccgcgcatacagcagttacaacatccatgtgcatctggctgacaataaccggcgttatccgggacaatgcggtctggattttgagaaaattctgacggtctttaaggagtgcggttatgacggcaattactgcaccgagatattccagctcccgtcgatggaggaagccgccagggaatccatccggtatctgagacccattgcagacagggtttacggcagaagcacacattgcggtcaaataagccggagcagggatgacagcggcaaaagccgcaaggaggggatacagatatgagagaggaacgaaaggaaacacttcaaaagctgtgccttgtattccgcagcaagctgattgatctgctgtacagtatccagacaggacatcccgggggttccctgtcctgcacggagatattgacagcgctttactatgagctgatggatgtggaccccatgaatccggaaaaggaggaccgggaccatctgattctgtcaaagggtcatggggctcccatgctttatcttgtactggcccacaaaggattctttcctctggctgaattgaagaacctgcgccaaacggggagtatgctccagggccatccctgcgtgcataagacacccggggtggagctttccaccggcccgctgggcctgggattgtccgcggggctgggaatggcgctgggagccaggcttaagggctatgattcctatacatatgtaattatgggggacggggaaatacaggaaggatgcatatgggaggcagccatgtcggcgtccaaattcaaggcggaccatctgataggcattctggataacaacggggtacagttggacggcaccctggaggacatcatgcccatgggcgatataagggccaaatgggaagcgttcggatggaatgtgattccctgcgatggccatgatgtggaggatatatgcagggccgtggaggaggccaagatgacggcggacaaaccttccctgatactggcaaagacagtaaagggaaagggcgtctctttcatggagggcaggaatatctggcatggaaaggccattggagaccaggactacgcacaggcaaaagctgagctgggaggtgaaaggtaatgggagaaatgacagcagtccgcgatgcctacggagcagcgctgaaggaattaggagaacaggatttaaggatcgtgggactggaggctgatgtggcttcctccacgaaaggcggtatatttgggaatgcgtttcctgagcggtattttaatgtgggaatcagcgagctgaatatggtgtccatggcagccggacttgccagaaccggtttcattccctttgtaaatacctttgccgtgttcctgaccgcaaggggggcggaccctattcagagtctcattgcctatgacaagctgaacgtaaagctgtgcggcgcttactgcggcctgtctgattcctatgacggggccagccaccaggccataacagatatggcatttgtgagatccatccccaacatgacggtcatttccacggcagacgggccggagacaagaaaggctgtgtttgccattgcagagcatcaggggccggtttacctgcgtctgagccgcgctccggcccctgtattttacggggacgatatgaggtttgagattgggaagggcatccgtgtcagggagggatccgacgtggccataatcaccacgggaacccttctgcacaatgcaatccaggcagccgctatcctggaggcagagggcgtccgggcagcggtggtggacatgcatacggtaaagcccattgaccaaaatctgattctggaatgcgcagaacagacaggagccatcgtgacagtggaggaacacagcatatacggcggcctgggcagcgcggtggcagaggtgctggcagagcgctgtccggtccccatggaacgggtcggagcagtggattttgccgagtccggggattacggccaactgatggaaaagtacggatacggcccggaatccattgcgttaagatgcagggccgtgatggggcgcaggcaggacaatgagacgtgaacaggaggaataagagaatgaaagaaccaatccagaaatatttccaggtgggcaccattcagtggatgacccacccgccggtcagctatccggtgtgtgcagccatgccgcccaaaagggcatgatggtggagctggaggtatttgactatgatatggataaggcggcgctgattgggccggtgtccctggcggcccggtttgcggctgatatgggaatgacccatcataactttggcctgatggcggatctgtcccattttcccaccacctatgagacatcccgccgcgtggtgcggaccctgcgtccctatatcacacatttccacataggaaacgcagtggttaaggagggctgcgaggcctacggggatcagcatcccagattcggattcccggagagcgccaatgacacggagcagctggcggaattcttccgggtgctgaaggaggaaggctttttttatgaaaaagagccttatgtgctgtccctggaggtcaaaccctggggggacgaggacggggaaatcatactggctaatacgaagcgcgtgattaaccgggcatgggcattggtggaggactgatgatatgaagattgttgtattggacggatatacggaaaatcccggggatctgagctggaagggccggggaagccggggtcgcggtgtccaacattccttcctacggcacggatgcagtggcccagtacgccattgccctgctgctggagctgtgccatcacgcgggcttccatgctgactgtgtaaaggccggagaatggactcgctgtaaagactggtgtttctggaagtatcctctgacagagcttgcgggaaagaccatgggaatcatcggattcgggcgcatcggaaggcgcaccgctgttatcgcagaagctctgggcatgaaagtgctggcctatgaccggtatcaggataaagacctggagacagacagctgccggtacgtggacctggaagagctgctggcttgttcagatgtgatcagccttcactgtccgctgttccctgaaacagagaaaattatcaatcgtcaaaccattgcgaagatgaagaaaggggtcctgattatcaacacttccagagggaagctggtggaggaagccgatctgagggaagggcttgacagcggtaagataggaggcgctgccgtggatgtggtttcgacagagcccatacaggaggataatcctcttttaggggcgaaaaatatactgattacaccccacattgcctgggcgcccagggagtccagacagagactgatggatattgcggtggaaaacctggtacagtttatggcaggcacgcctcagcatgtggtgaataaaccatgaggcaggccatttaaaaacaagacaatcgaacagaaacggggcagccggaaagctgccgtcatacctgatacgggtgtggcggcggctttccggcttttttggaaaaaacgccatattcagtatgggactcgaattttgtcgataaatattgtacctgttcacggttatttcgacaacatccgcgctttgaaacagctataatggctttcagaaagtttgctggggaggtgaggccggactgagtggtttatacagtatacatagatgtggtattcgcggtcaataccattatggacatgatggttctgaccatcttaaacagggttttattatacaggaccacaaagcggcgtattctgaccggagccgtcatcggcggtatatggtcctgtgtggtgagcctggcacccggtattccggccgcagtggagatattggggacgtatgttgcggtgagcagcctgatggccgtagccgcttatcatttgaaaagccctaaagaggtaattaaatccgtggcgggcatttaccttgtatccgtggttctgggaggcgtgatgctggtgctctatgagcacaccagggcagggtattacgcgtggcttttggtggaggccggacatggaagaaggattcccgccgttgtctggattttaatgattgcaggggcagccgcggcttgctatggattttcaggggggattaaggaattaatccgtaccatggcccacaggaaggatttatgcagggttaccatgatttacggcgaaaagaaagagacagtcacagggcttatagacacgggcaaccggctgagggagcctgtgagcagccagccggtccatgtggcggcagccggtcttatgaagcagctgtgtccgacggtaaagggtgtggtctatgtgccgtaccagtccgtgggaaccaccagcggaattctgccggccgtgttcattgaccggatggagatagaacaggagggcggcaggtacagccttgagaagcctctcattgccattacgaagcaggagctttctccctcaggggagtatcaaatcctgatacagaaaagcgactaaggaacttgaataacacacaacgtacaggaggacatttccatgattataaaagtatccataccaaaccgtttccagttaaagaccatccccagcttcaggaccgtactgatgcccaagcagggggaggtgcattatataggaggcgctgatatactgcctgctcctctggaatcggaggaggagagccggatgataggacttttgggaggcgaggatgacaaggaggcaagggctgccctgattgagcacaacctgaggctggtagtctacatagcgaagaaattcgacaacaccagcgttggggtagaggatttaatttccatcggcaccatcggcctcatcaaagccatcaatacctttaagccggataagaacatcaagctggccacctatgcttccagatgcattgagaatgagattctcatgtatctcaggcggaataataagacgcgtctggaagtgtccatagatgagcctctgaatgtggattgggatggaaatgaactcctgttgtcggatattcttggaacggatgaggatgtgatttatcacgatattgaggatgagatagaaaaaagcctgctcagcaacgccatcagccgtttaaatcccagggaacgtaaaatcgtggagctgcggtacggccttacaaacgaggacggggaggaaatgacccagaaggaagtggccgatctgctgggaatctctcagtcctatatatccagactggaaaagaaaattatgaaacggcttaaaaaggaaattgtcagatttgaataagcatggtttgaatgttacggaaaagagcaggagtttcctgaggacatacttaaatatatggacctgaccaaagaaaaggcggaggccatatggacagagccggatgaggaaggcagcctgtccgccggctgggttcaggaagatgggcagtggaaatacaggatgagaaacggcgcctataagtcagacggatggctggtggacggaggaaagtggtattatctgggaacagatggagccatggtaaaagaggcgtatactccaggcgggtactgggtcaatgcccagggagcgtgggagccgtatcacaggtaaaacatagacagagcaataccgtcaaaaggagattggcaaatagatacgcccggaaagggcttcatccacaggctggatgtccctttccgggcgttgtctgcgttatttgagctgaaccatgttatccttgatgcggaatgttccgaagctgcggataaagctggagatgcggctgaaaccatactgcttcacatcaaaggaagggtatgcctttttcagctcatcgtgtatgatgctcagattatccacatgaccattatatcccttgatgatgcggatgatttccttttcaatctcagtcttagagatgctggcgctcttttcctggacaaaataaccgccgtggagcttgaccacctggaagtcgttgttgttcaggctctccaaaaaggtggagagcttggagtagccgtagtttctgacatcaaagtctgaaaagcgctttgtaaggaagtttcccacctttgcaaggatgatcggctggttctggctgttattttcaatgaggagcttagtgatggctttctggatttcatcaatgttggtaatggtcttctggttctcgatgaccgatgtctccggcgtatcgtcagaggatatgatctccagcaatttaaacgtatcgcaggctgcacgaaagggttttggggttttctgctccccgattcccatgacaaacatcccggcctccctcaggcgctgggccagcttggtaaagtccgaatcgctggataccaggcagaacccatccacattaccggagtagaggatgtccattgcatcgataatcatggccgaatcggtggcgttctttcctgcggtgtagctgtactgctggatgggatttacggaccagtctaaaagcacatttttccagctgcgcttttcgttatctgtccaatcgccgtaaatgcgcttgtaggtggcgattcccacatccgacacttcatccaaaatgtacttgatatacttgggggagacattgtctgcatcaatcaatactgcaaatctgcgttcattttgttccatagatatgttcactttctgttggcatatgtttcaaacaagcactaacatgaatagtttaacacatctgctgaaaggcttcaagggtcagcttaaataggatttcatacttttcagcgcatttttttcaaggcggctcacctgagcctggctgatatggatttcctgggcaacctcggtctgggttttcccctcaaagaaacgcatgtcgatgatatggcgctcccgctccggcagccgtttcatggcctccaccagagataaatcctccacccagttttcctccagattctttttatcactaatttggtccatcacaaaaagagggtccccgccgtccgtataaacaggctcatacaggctgacaggggtctgtatggcgtccagcgcataggtgatgtcttcctttgaaacacctatttcctgcgcgatctccatgagagtgggttccttggaattggttctggtaagctgctctctggcatagagggccttataggcagtatccctcagggaacggctgacccggatggaattattgtccctcagatatctgcgcacttctcccagtatcataggcactgcataagtggaaaatttgacattctgagtgatgtcaaagttgtcgatggccttgattaggccgatgcatccaatctggaacaggtcgtcgatgttttcttggctgtttgaaaagcgctggattacgctgagtaccaggcgcaggttccctttgatgtactgctccctggcctccatgtcaccgtccagtattttttgaaacagttcctctttctcttcattgctcagtaaaggcagtttggcggtattgactccgcatatctcaactttgtagcccgacataatccttacctccgttataatgccatacgccctgaattggaaaaatacagggctgtactggatgaatctgctataacgaaatgatgtacggattccagatgttttatacggtttggagggagaaaaagatttccatttttttctggtttgtgtggattctggcatttttgctgacagcggccatgagataacagcagatgatctaggctttaccaatggcaggatcgctgagtttgcaaaggtatttttcggtaccaagggtgccgtatatgaggtatatcccatgcgggccatatgaggtcatctatccatggtcacaagggtccaccggtcattctgctgcatgatgaagcatggctttttcactcggtatctgtaataggcttccgccagggtctggaatatcctgtatttcatcatggcggcacagattggatagatcgtcatatatgtaaattctcctttcaagggtgatattatattttattcagcatgtcctgaaatatgactggtgatttgaaggtctggtgcgtatcctcatatttacgccggacacaacactacaagccttctcccggtatgcaaaatgagatgcaggtgcccattcccttcttgctgagtatcttaagtccggctccttccccgtagcgcatgattaggcggctgtttacattggtaagcccgatattctcgctgcccggattggctatcttttcatacaattttctgatatctgtttttttcattcccactcctgagtcaatgacggaaagaatcagttgtccgcctcttttaacaatgcgcagcttgatgaagcctgagccgttcaggggcttgatgccgtggtacaggctgttttcaatcaggggctggagaatcaggcgcatgatgggaacactctctagttccatttcgtattcatagtagaggatatacttgtcctcatagcggtaccgctgaatgctgtcatattttttcagataatcgatttcatcctttaaggttaccatggagtggggattctggagggaatatttaaggatatcggacagcgcctcaatcatctggtttaccgcggtgggcttatgggtatattccatggccttgaaatccagggtctgcagggtattgaacagaaaatggggattaatctgcagctgcagagccgtcatttcagccaccttctgttcctgctcccgcagggccagctggctgcgcaggaaggtctggttcagaaagagctggacaatgttattgaggattatatcgtattcatccttgatgaacgcgggcttttccgggttaaatacgccccgctctgcatccgagaacacttcaacgaaataatcaatctgctgataattctttttggtgatggtataagcaatccaaagagaggtcgaaatcaccgcagccaggaccattaaaaactgcaggagcagggtgtaaagggcctgatagtagttggagtggctgatgcaggccgcgatataagtcccgcagtcagccgggatgattctcacatagtattttccgcggcttaagtccgcccacccgcggcaggcgtcgtccggcgactgctcaagacggctgaccagcagctccttgtcctccagggacagctgggcggtttgagcgcctccctggagcaggaaattgccgcccccgtccaggataaagaaccggtccagctgggaacttgtattgatgagctgttttaactgttcctcatatatgttgaccatgaccacgcccttaaacatgctcagcttcttaaagtaggtaaggaccgggacgggctgtgtgtaggagtactggtgcatttcccttcgttccagccattcgtcctggtcagagtggtcataggaatccttccagctcaggtctgaaaaccgggacagccgtgtggtccctccggtgtcagaggtgagaatggaatcatagccatccaggtaatagtacacagaggcaatatagggagcgttgttggtcagtgaattaaagttggacaggatggtgttggtcaggattacgtccaggtagccaatctgcttatgggagataaatccccgcaaggagatggacagcctggggttccgggccaggatatcgtactgggtggcggcgctgtccaggaccagggagtagttatccctcacagcctgggccgctgtctcggcatcctcacggatttcgctctgttttccctgaaagacaaaggccaggaataccaggaatacggtgaggatgggaatggatatgatggctgaataatataaaaagctttttataaaattacgttttctcatggttttcagttccttttggcatttttccgggtgggggaagccgggccgcgtcacgggtgtgattccggacggctgccgcaattacggtactgcgtgggcgtcatgttgaaatactggtggaatgccctggagaaattcttgggattgtcatagcctacccggtaggcaatttcatattgcttgcagccgatatcccttagcatccgggctgcgtttaccatccgggtctttaacagataatcggagaagctggtatccgagtgctccttcatgattttggacaggtaattagggcttaaggacaccagcctggcagcctgttccagggtggcgtcctggtagtcagtgtccagatagttttttaccgtggtgatgattttttcatagtagctcaagctttcacagatatccggcatgtcccggcccttttcgctgtccagcagctcctttacccgggtcagacagtctgccaggtcctcatatttaactggttttagcagataatcaaagacgccgttgcgcagggctttccgcacatactcaaaatcctggaaaccgctgaaaaatatgatttttacctttttttgggacagcagacgttccgagagctccagtccgtccatgaggggcatgcggatgtcggagagaatcaggtccacaggggttgacagggcaaagtcataggcatctctgccgttggaaaatgagccggtaatctcaaaacccagctggttccatggaaagagattggccagtccgctccgtatcttggcttcatcgtctgcaatgattacttggtacataggtgggcccctttcttaaaaaatcctgcttttattatatataaaagagagagaaaaatcatctgaaaactggatccgggacaaaggattcccaataatgaataaatattgtaaaaaatgatactttccccggaattttgattaaggaaagataccattttcgtaagtacggtttcttaacaagatggcaaaagtactgtacaatagggacagttgaaaaacagggcagaaacaatgatgcagcaaaagaacaacaggaaaatgtaaaagggaggtaattagtaatgagaaaagcaaaacaaatcacaggccttttaatggctggtattatggcttccaccgtattggcgggatgcaccaatgaaccggctccttcatccacatcccaggctgaagccggaaaggacagtggggcaggcagcagcgcgccggccgcatcaggcgaccagattacgctccgcttcatgtggtggggcggagatgagaggaatgaggcaaccctggctgttattgaccagtatcagaagcttcatcccgaggtgcggatcgaggcggagatgaactctgaccagggatatattgacaaggtatccaccatgctggccaacggcacggctcctgacattcttcagcagaacgtggactccctgccggattttgtgtccagaggagattttttcgtggatttctatgagtacaaggatacatttgacacctccggctttgacgagacatttatcagccagttcggcacctttgacggaaagcttttggccctgcctaccggtatgtcatgtctggctgcagtggccaacaaaaacgcggctgagacctgcaatgtggatctgacaaagcagattacatgggattccatgctggaggacggaaagaagcttcacgcggagaatccggattattactacatgaatactgacaccaagatactctgcgagtacgtgctcaggccatatctgcgtcagatgacaggagaatcctttatcattgacagtgaaaagaagatgagctttaccagggaccagctggtagaagtgcttacatacatcaaggactgctatgacggcggcgtctttgaaccggcagaggacagcgctaccttcaaggggcagattcacaccaatccaaagtggatggatggaaaatttgtatttgcctacggcccctcctccagcatcaacctgctgatggatgctgttcctgaagcggagtgtaccgttgtgcagatgccgatggcaaaagaccggatcaacgacgggttctttgcagatacgccacagtatatgactgtgaataagaattctgaacatgtggaggaagcagtggatttcctgaactatttctataacagcgcagaggcccaggagacacttaaggacgtaagaagcatccctcccacatccacggcaaggcagctgtgtgcggataagggactcttaaaccagaccgtggtggatgcagtggatttagcggcagggcttaacggcaggagcgataaaggatataccaccagcgcagaggtttatgcgattcaggaagatatgatagaaagcattgcctatggacagagcacccctgaagaggcggccgacaatgccattgaactgattaatgactatctgagcggcctgaactagaaggctccagaatcaaacataaaagagattggcaggcggcccggacatcctttcccgggccgcttgaaggataggaggaagataggatggcaaagccaaggcacggcggctggaccaaacggaacaagattggattcatgtatgtgtgtatctggggattcggttttctggtgttccagctgtacccctttatcagttcgctgctgtattcatttacaaactatgatatatttcatgcgccggaatttgttgggcttgataattatgtcaagttatttacaaaggacagggagttttggaattcaatggcagtcacattgaagtatacctttatcacagtgccgggcaaggtggtgctggcccttattattgccgtgatactgaaccggaacctgaagggaatcaacttcatacgaaccgtatactacataccgtccctgctcagcggttccgtggcagtggcaatcctgtggaaggtgctgttcatgaatgacggtttcatcaacagccttctgggcctggtccgcatcggtccggtcaaatggctgggaaccccggatatggctgtcatcacaatctgtatgctggaaatatggcagttcggttcctccatggtgctgttcctgtccgcccttaagcaggtgccccagtccctgtatgaggcggcccggattgacggggcgtcaaaacccaggatgttcttcaagataaccctgcccatgattacatccatcgcgtttttcaacatcattatgcagcttatcacggcccttcaaaactttacatccgcatttgtggtgacgagcggcggtcccaataaggccacctatgtgctgggaatgaagctgtacacggatgcatttaagtactttaagatgggatatgcctgcgctacctcatggattctgttcatggttatcctggtcatgaccattgtcctgtttgtgacctcgaagaaatgggtttattacgataattaggaggacggcatgaaagagaaaaagattaaaaacggtattacctatgtaattctcggaatcgtaggtgtggtgatgctgtttcctgtcatatggatgttttttgcctgttttaaaaccaataacgagatattcggcagtctgagccttctgccccagggatggagcccggaggcattcatcaaggggtggaagaccacgggaacctatacatatgcccggtatttcataaacacctttgcgctggtggttcccaccacactgctgacgctggtgtcctgctccatcgtggcctatggttttgccagatttgattttcccggcagccagttccttttcatggttctcatagccacgctgatgctgcccaatgcaatcattattatacccagatacgcattgttcaacaagctgggctggctggactcctatatgaccttttacgcgccggctgccgtgggatgctaccccttcttcgtgttcatgatggtgcagttcttaaggggacttccaagggatttggatgaatccgcctgcattgacggctgcggccccttccagtgttttatacagatcctgcttcctctgcttaagccagccctgttttccgccggtctgttccagtttttatggacctggaacgactttttcaacaccaacatttacattaacacggtttcaaaatttccgctgtcactggccctcagggtgagtattgacgtgacgtccaatatacagtggaaccaggtcatgtccatggcgctggtgtccgtgattccgctgattctgcttttctttgcagcccagaaatattttgtggagggcattgccacatcgggcctgaagggatgattgggtaaaggaataaaaggcgaagaaataaaaaagcggggaaacaaaaatcagatattgaggggagacgcaacagtgagatacggttcgtgatggagggggacagggctgtccttcgtctcaggcgtatgccggcggagggcgccgtccgttcccagggagtgctggaggtgttccaggggattaccagggaagctgcgaaataagcccctggcccgtaacagtggacggaactgaaatcacaatccgcagggacgactgggatatggaccagctctatggaaaagctcttgctttcggggcgccatacagcgctgcgcggaagctccttccaggcattacaggggcaggcttcattatataaacgggcttaaggccatggatactccgggcgggctgtcatcggacggcctccatccatcggatcagggtcatgaaatgatagcggaaaggcctgccggatatatggcagaaaaaaggaggattgattgagaatatgagtacgtacaaaaatccgattctgtatgcggattattccgacccggatgtggcgcgggtgggggaggattattatatggtgtcctcctcctttacctatattccgggggttccgcttttacattccagagatctggttcactgggagctgattaatcactgcgttaaagagcttccctttgagaaatatgcccttccatgccacggctccggcacatgggctccatccatccggtatcatgaggggacattctttgtgtttatcccgctggtggatgagggaatcctggttgccagatccagggacccctacggtgagtttgaatgtaatatgctgtgcgaatcaaagggatggattgacccctgtcctttctgggacgatgacggcagggcttacatggtctttgcctatgcaaagagccgatccggtataaaacaccggctttcgctggcggaaatggatccccagtgccgctgtcttctggcagagccagggcttatatttgacggtgaacagattgcgcctacatcggaagggccaaagatgtacaaaaagaatgaatattactatattctgatgccctcagggggcgtggagaccggatggcagtcctgcctcagatccaggtctgtctatgggccctacgactataaagtggtgatgcaccagggaaattcccgggtaaacggtccgcaccaggggggctgggtgacatcgcccgacgggaggcactggttcatccatttccaggatgtggtggagctgggcagaatcatccatttgcagcccatgtgttttctggatgactggccatttattggccaggaccagaatggagacggcattggggagccggtggaggagtggcccgtgccggcagaaggaatgccggaatacgccatccgccagtccgatgattttgcggagaagacactggggctccagtggcagtggcaggccaatcccaatacagacttttattccctggaggaacatccgggatacctgcggctgtattgttaccggaatccgggcagggaaaacctgctctggtatgcgcccaatgtgctgacccagattccgcagaaacaaaagctgtccatgaccgtgaagctgtctctttcaggcggtgaggacggtgattttggcggaatcggcatggcgggccatgattacggatatgcgggtttgtactacacgggaaagggaattcaggtaagatgttaccggggaacggtcacggatcccatgtttgaaggggaagccggtgagaagctggtcttttcacaggaggcagagggggaacaggcttggttcaggctgaccctggaggaagataagacgtatggcttttcctattcttctgacggcaggaactttacccggatcgaatattcatttccactgaaacgtgccacatggaccggcgcaaaactctgcctgtggtcctgctcacgggaaaaccgggagtctgggggatattgtgattatgagtatgtggaaataaaataaaagacaaggctgtctgcgtaagacagcctttgtttatgatgaggattcaggaacatgttctaatgaacctccgtattcttccggtataaaatcaacagtcccttcaggagcagggcgtcgtccaccagtatcttatggcggcacagcggcgtgatgaacctggccagtccgccggtggcgatgatggtgggaggctctcccagctccttttccatgcggtccagaatcccgtctatcatgtccacgttgccgtaaatgatgccggagcgcatacagtcaatggtattcttcccaatgacatggctgggaacctccaggctgatgtagggcagctgggccgtcttgctgctgagcgagttaagggagaccttgagaccgggaaggatggcaccgccgatataatttccctttttgtccacggtgcacagcgtggtggccgtgcccatatctatgaccaccaggggaaggggatgttcgtggctggctgccactgcgtccacaatctggtcgctgccaacggtcttggggttgtccatgatgatattcatgccggttttcatgccggaacccaccagcagcggacggtttcccgtcaccttttccacggcgttcaggatggtggaattaacagggggaaccacggaagagagaatggctccttctatgcttgcaatatcaatctgatgcatctccaggatgttcttaaagctcaccgcgtattccgtatccgtgcgtccctggtccgtggtgacccgttctatgaaataggtttttgtctcgtctatgccgccgatgaccgtattggtattgcccatgtcgattgctaaaatcattgggggaactcctttcaatcatttaggatgtatgttatactttaacatggattgtaacatagaaaaagaggaaagacaaccggaggaatcatatgttaaaaggaaagacagtccttcttggcgtgacaggaagcatcgcggcttataagacagccggcctggccagcatgctggtaaaaaagggcgtgaaggtccatgttctgatgacggagaacgccactcacttcattaatcccataacctttgagagcctgacaggcaacaaatgtctggtggatacatttgacaggaattttgaattcagcgtggagcatgtggccctggcaaagcaggcggatgtggtgatgattgctcctgcgtcggcaaatgtcatcgggaagattgcccacggcattgcggatgatatgctgaccactacggtcatggcgtgcaggtgcaaaaaaatactggcgccggccatgaacaccaacatgtacgagaatcccattttacaggacaaccttgatatttgcaggcgctatggtatggaggtcataacaccggcctgtggctacctggcctgcggggataccggggccggaaagatgccggagccggaggtattgtatgaatatatactgcgggaggccggctatcccggggatttggcaggcagacggattcttgtgacagccgggcctaccagggagtccattgacccggtgcgctatatcaccaatcattccacaggcaagatggggtatgccattgccagggtggcggcctacaggggagccgacgttaccctggtaagcggtccggtggatctggcccgccctttgtttgtggagacggttccggtggagagcgccagggaaatgtttgaggcggttaccgcaaggagcggagagcaggacatcattgtcaaggcggcggcggtggcggattaccggccttccacggtgggaacagaaaaaatcaagaaatccgacggtgatctgtccattgccctggagcggaccgacgacatcctgaggtggctggggcagaaccggagggacgggcagtttctttgcggattttccatggagacccagaatatgctggagaattccagggccaagctggcaaaaaagcagattgacatgattgtagccaacaacctgaaggtggagggcgcggggttcggcacggacaccaatgtggtgacgctcatcaccagggagagcgagacagagcttcccatcatgtccaaggaagaggtggctgaccgcctgctgaccgagattttgaaacggacaaaaggacagggaggattgaatcctgcatgaaacagggttcagtccttttttctttcctgctccccgtgctttgccggaagacagactgacaatgtcttaacaaagtcgttgtgaaatgtatctaaaaaagcgtggaattcacggctaataccctgccttcattgtggcttttgactaaaatggcaaaacagaaatatggatattgactttgaaactgtcaaaatgtataattaaatcatgcttgaaacgggtttcaagaataaaacacacaaagggcggaagggccggaaggctgtaatctgcagacaggcaggatggtggacttatgacgagcatacgtgatgtggcgaagctggcgggcgtatccccctcaaccgtatccagggtaatgaacggtacggccagggtggatgatgagaagaggcagaaggtggaacgggctatatcagaaaccggtttcaaaccgaatgaggtagccaggtcgctttacaagcgttcatccaaaatcatcggcatactggtgccaaacattatcaatcccttttttaatgagctggcgggggctgtggaagaagaatgtgaccgcaggggataccgcctgacgctctgcaactccaacgatgatttggaaaaggagaagcggaacttaagcctgctggagcggatgaacgcagacggagtcatcctgatgactaacatggatgagatacataaggaagtgggaaactgccggattccggtcgtgatgattgaccggcagattgaggggggcaaggaaattgcctgtatccagtccaaccattaccagggcgggcggatgtccatggagcatcttttggaatgcggctgcaggcatattgtgcagatgagcggtccgctccatctgtccagtgccagaaagcgccaccagggatatctggatgtgtgcggggagcggggaatcgagcctgcctgcatagagggaaattacagttttgaatcgggaaccgagatggcagcgcggctgttggagaagtatccggatacggatggaatcatagcggctaacgacatggtggccatatcggtttataaggagcttcacaggaaaggcataagggtgccggaggatatacagttaatcgggtttgacaacatatccctaagcagcctgttcacgccggagattaccaccattgcccagcccataaaaaagatggggcaggatgcggttcggatgctgacagaatacgttgccggagctcagattaacaggaataaggtattcgatgtcaagctgattaaaagggacacaactctttagggaatgtccgcagcgcagtaccaggacattcccaggcatcaaagggataaaataaaatgtaaagtagaaaaggaggaactatgaagacagcagtggtaggcagcatcaacatggacatgacagtgacagccgagaggattcccttaaagggggaaacgctgaaaggagaggacatccgctacatacccggaggaaagggtgccaatcaggccgttgccatggcaaagctgggggcggatgtggagatgttcggctgtgtgggcgacgatgaggccggaagaagcctcataaaaaacatggaggacatgggagtgggaaccacccacattaaagtggctccaggagtgaacacagggctggcggtcatcaccgtaggggatcacgacaatacgattgtggtggtggcgggagccaatgacagggtggaccgggaatacgtggacagcataaaggatgctctgctgtcatgcggcatcgtattgctgcagcatgaaattccccaggataccatcgagtatgtaattgatatctgccatgaaaatggcgtaaaggtagtactgaatcccggaccggccagaccggtgaagccggaagtactggcaaaagtggattatcttacgccaaatgaacacgaggcagccatcctgttcggggatatgcctgtggaggagatgcttaaggcacatcccggcaagctggtgattacccaggggtctaaaggcgtatccacatgccttccatcaggagaaattcttaccgtacctgccagaaaagccaatgtggtggacaccacaggagcaggagacacattaaacggggcatttaccgtacagattgcggggggcagcaccatggaggaagcgctccggtttgccaacacggcggccagcctgtccacggagcggttcggagcccagggcggaatgcctgtccgcagccaggtactggaagccatgcatcaggagagaatgtaacgcattgacaaacacgctttcggcgtaaagaagacggaggaacagaacatgaagagacacggcatactcaacagcaatatttccagggtactgtcagccatggggcatacggacagaatcgcaatcgctgactgcggactgcccgtgccagaggggacagagcgcattgatttggctgtgacatttggaaatccccggtttatggacgtattgaaagcggtttcaaacgatatgaaaatagaagcggtggttctggcagaggaaatcaaagaacagaatccacaaatcctggaggaaatccaggagctttttgccagctttgaaaccggtttcaaaccggaaaaagtggaatttgtcccgcatacccgctttaaggagatgacaaaggaatgcagggccgttatccggaccggagagacaaagccctatgccaacatcatcctgcagtccggctgtatcttttagagcagaatttatctggaggaaaacaacatgaaaatagaaatgaaaggaatcaacaaatcctttggtcagaaccaggtcctaagggatgccggctttgtgctggacgacggagaggtacacgccctgatgggagaaaacggcgcaggcaagtccacgctgatgaaaattctgaccggcgtctacacccgcgacgggggcaccgtcattgtggacggaaaagaagtgacctacaaaaatccccaggaagcggaaaaggcaggcattgtctttatccagcaggagctgaacgtactgttcgacctgacggttgaggaaaaccttttcctgggcaaggaaatcaaaaagggatttggaatatgtgaccggaaggccatgagggcaaaggcagaggaaaccttaaaacgtctgggagtcagcatccccacggacaaggtaatgtctgggctttccgtgggccagcagcagatgatagaaatttgtaaggcattgatggtggatgcaaaggtcatcatcatggatgaacccacggcagctcttacccagagcgagacagaggtgttgtttgaggtgatgcagtccctgaggaaaaagggagtgtccatcgtctatatatcccaccgcatggaggagatttttgagctttgcgaccgcatctccgttctcagggacggcacatacataggcacaaagaagattccggaaactaatatgaatgaaatcgtcaaaatgatgattggccgtgaaatcggcgagcggtatccaaaacgtgactgcgccatcggcagcgaggtgttccgggtggaggacctcacaaaggagggggtgttccacgatgtgaatttctccgtaaaggccggtgaggtcctgggagtatccggactgatgggagcggggcgcacggaaatcatgcaggctattttcggaaacctgtcctatgacaggggcagcattttcatcggcggaaagcaggcggtgattaagaatccgctgcaggccattgagcatggaatcggatttataacagaggaccgcaagacagagggacttctgctggaggagagcattgagaaaaatgtatccctgaccaatctggggcgtatctcaggcaagggcagggtggtaatcagcagggagaaggaaaaagggctggtcacaaaggccatagaggagcttcatatcaggtgtttcgggcccggacacgagtgcgtgaacttaagcggcggcaaccagcagaaggtggtattcgcaaaatggatttacacagaacccagaatactgattctggatgagcccacaagaggcgtggacatcggcgccaagaaggagatatacagcatcataaaccagctggccgaaaagggggtcgccattatcatggtgtcctctgagctgccggaggtattgggaatgagcgaccggattatggtggtgcgcgaaggtatggtcaggggaatcatcaatcagggtgaggctgaccaggagaagataatgacattggctacgggaggtaccatataatgaatgaaaataagaataaagtcatcaattacacccaggatttcggggcgctcatcgcccttatcctgctgatggcaggcatcagcattgccagcccaagtttccgcaccggggccaatttcctgtccctgctgcgccagtcctccatcaacggactcattgccttcggcatgacctttgtcatcctgacggatgccattgacttatccgtgggctctgtgctggccctcagcacggctctgtgcgccgggatgattacggccggagtgccggccggcctggccatgattctggcgttggtccttggatgcgccatgggcgtgatcagcggcgttatggtcaccaagggacgtcttcagccctttatcgcaaccctgattaccatgacggtataccgcggcctgaccatgatatacaccaacggtaagccaatctccaatctgggagacagctttatcctgaaggtggttggaaagggaaagttctacggcgtcccgattccggttatccttctgatactcctgttcctgctcttttatttcctgttaaataagaccaccttcgggcgcaggatttacgcgaccggaagcaactggaaatcagccaagctggccggcgtgaacatacacaggacaaaaatcatcgcctatgccatttccggtaccatggcagcattatccggcctgattctgctctccagactgggatccgcgcagcccaccctgggaagcggctatgagctggacgccatcgccgcggtggccctgggaggcaccagcatgagcggcggcagaggaaaaatctacggaaccctgattggcgtactgattatcgcggtgctgaacaacggccttaacatcctgggcgtatcttcctactatcaggacgtaatcaaaggtctggttatcctgattgcggtactctcagaccgcaagagataggaatacgttaaactgcacacatgaatctgttatgaatgtaagaatatgaattttgggagggaaagatcgtgaagattaagaaaatactggctcttatggtaactggcacaatgcttatgacaatgggcggctgcaacgccatcaccattgacggggaggaaaacgtcagggaaggaagcagcggaaacgtgattggtttctctgtctccaccctgaacaacccatttttcgtgaccttgacggaaggagccaagaaggccgcgtcggaaaagaatgtggagctggtggtggtggacgcgggagacgacgctgccaagcagaccagcgacatcgaggatttggtgtccagaaatgtgggcgtgctgattgtcaacccggtggattcagacgcggtggccccggcggtaaagagcgccatgtcccagggaatcaaggtgattgcggtggaccgcggcgtcaacggagtggatgtggactgccagattgcctcggacaatgtggcgggagccaggatggcaacagagtatctcatggagcttgtgggcgagggcgccaaggtggctgagctgcagggcgtgccgggggcctcggccaccattgacagaggcgagggattccatcaggtggcagacaaatcccttcaggtggctgtcagccagaccgctaatttcaaccgcgcggagggcatgacggtcatggagaacatccttcagtccgacggcgccatcaagggtgtgtttgcccacaatgacgagatggcccttggggcagtggaggcagttgccgcttccggaaaggacataaagattgtgggatttgacgccacggacgacgcccagaaggcggtgaaggacggcaaaatggcggccacggttgcccagaagccggataagatgggggagacagctattgagaccgctgtcaaaatcatggcaggggagactgtggacaaatccatacccgtggaagtggagctgattaaataggtgaaacagattgacagatgagaaatggacccgccagaaccggaattttcggattggggcgggtccgctgctgtttttatattacgattcatggcgcgccagcagtccttgccagcaacggcaatttacagagatttccatagaatggacggaaaaactgaggggaaatcgcaggagggaaattcaaaagccaaaggccttgacttatgattccaatcataatagaataaaaattggatgattttgggcgtacttccaaagtacgtccatcttttactcaatggaaaacggaggacgaataacttgtcacagatagataaccagatgacagaagagataaaaaagcggaggacatttgcaatcatatcccaccccgatgccggcaagaccacgctgacagaaaaattcctgctgtacggcggcgccatcaacctggccggaaccgtcaaggggcgcaaggctgccaagcatgctgtgtccgactggatggagattgagaaggagagaggtatctcggtgacctcctctgccatgcagtttaattacgacggattctgtatcaatatcctggacacaccgggacaccaggatttctcggaggatacttaccgtaccctgatggcggcagactccgcggtcatggtcatagacggttcaaagggtgtggaggcgcagaccatcaagctgtttaaggtatgcgtcatgcgtcatatccctatctttacttttatcaataagtttgaccgggaggccagggacccttacgagcttctggacgagattgaggaagtgctgggaatccgcacatgccctgtaaactggcccattggttgcggcaagagctttaagggcgtatacgaccggttctcgaagaagataaccaccttcacggctgccatgggcggtgcgaaggaggtggacagccaggagtttgacgtggactgtgcggatgtggattccttaatcggacaggactatcaccagcagctgagggatgacatcgaactccttgacggggccagtgatgagctggatatggagcgtgtcaggattggggatttatcccctgtgttttttggttcggccctgaccaattttggcgtggagacctttctggagcatttccttaaaatgaccacgccgcctctttccagaaagacactggacgggaagatagacccattccgccctgatttctccgcttttgtatttaaaatccaggccaacatgaacaaggctcacagggacagaattgctttcatgcgcatctgctccggcaagttcgaggcaggcatggaggtaaaccatgtgcagggaggaaagaagatccgtctgacccagccccagcagctcatggcccaggaccggaaaatcgtggaggaggcatatgccggcgatatcatcggcatattcgacccgggaattttcgccatcggcgataccctgtgcgcttccaatgagaagttccagtttgagggaatacccacctttgcgccggagcattttgccagggtgcgccaggtggataccatgaagcgcaaacagttcataaagggtgtgaaccagattgcccaggagggtgcaatccagatattccaggagtttaattccggtatggaggaaatcatagtaggtgtagtgggcgtactgcagtttgaagtgctgacctaccgtctgcgaaacgaatataatgtggaagtcatactggaaaagctgccctttgagcacatacgctgggtggagaatccgggcgaggtggatgtggccaggattcagggcacgtctgatatgaaacgaattaaggacttaaagaacaatccgctgctgctgtttatcaacagctggagcgtgggcatggtattggaccgcaatccggcactgaagctctcagaattcggaagagcctgatcccatgcaaggaacaggaccacgggaccagactacggtccctgaatgctcataacgaggaggtaaaaatcatgagtaagattgatgatgtaagggctgccatggtggaggccatgaaggctaaggacaaggccaggaaggattccctttccatgctgctgtccgccctcaagaatgcggaaatcaacaagagggagcctttgacggaagaagaggagaacgcggtcgtcaagaaggaaatcaagcagacccaggagacatacgagatggcaccggcggaccgtgaggacatccggtcagaggcagccgccaggatggctgtatataaggagtttgcgccggtagacatgagcgtggagcagattcgggaagtcatagcctctgttctgtctgagctgggaatcgggactcccacggccaaggataagggaaccattatgaaggtcctgatgcccagggtcaggggaaaggcggacggcaaggtggtcaatgagacgctggcttccatgttccggtaaggtaagataggcaccgggggtttttcagccccagaccttccggtttggcgtgctgagcggcaggccgggtggggcagcataataaaaggatgcggggcttaagcttcgcaggaaaaggagacggttacgatgtataggaaagagattgaaggttttattgattcccatagggacgaaatgatagaggatatctgcacgctgtgccggattaacagtgagaagatgccttatgtggagggcaagccttacggggaaggtccgttccaggcgcttcaggcagctcttaacatggcagaggggtatggttttaccatccgcaactacgacaactatgtgggaacagccgacctcaatgacaaggagagacagctggacatattggcccacctggacgtggttcctgccggcgagggatggactgagacaaagccctttgagccggtggtaaaggacggaaagctctttggccgcggtaccgctgatgacaaggggccggccgtggctgcgctctatgcaatgagggcagtgaaggagctggatatcccgttaaataagaacgtcaggctgattctgggcacggacgaagagtgcggaagctctgatatcgtaaattattacgacaaggaggatgaagcgcccatgaccttttcaccggatgcggaattcccggttatcaacattgaaaagggccgtctggaaggccatttccatgcatccttccaggcttctgaggcaatgcccagactggtgaaggcggaagccggaataaaggccaatgtggttccgggcaaggccagagccgtggtggaaggcgttgaccttaagacattggaggcagcggcagaggctgtggaaaaggaaacagggatctcctttgtgctggagggggatttgccggttatgacagtcactgcacagggagagggcgcccacgcatccacgccccaggagggaaagaatgcccttacaggcctgctggtatacctgacacgcctgccgctggcagagtgccctcagatgaatatggtaaagaacctgctaaagctgttccctcacggcgatacctgcggaaaggcagccggtatcagcatggaagaccagttgtccggtaatctgacccttgccttcagtatgctgactgttggagccgatggcctggaaggcgtatttgacagccggtgtcctatctgcgccacggaagaatccgtgctgggagtgataaaacaggccatggcggaccatgggcttacactggaaaatgattccatgataccgcctcaccatgtggacggaaattctcatttcgtaaagacactgttgtctgtatacgaggactatacaggccttgagggaagctgccaggctacaggcggcggcacctatgtccacagccttaagaacggtgttgcttatggcgcggccctgccgggaacagacaaccgcatgcatggagccgacgagttcgcggtggtggacgagcttgtcttaagcgcaaaaatatttgcacaggtcattgtggagctgtgcagctgatagtagaaattaaaatatttcgtcggcgtttccggaaaaagtgcttgacaaataggttcatgtgatgtattttcttaactaagataaatcccagcgatttgataggaatcaatataggaggaacttatgaatcagttaagagccatgcagatgaatatggatatgatgaacagcatgtatatgatgatgtgctgtgtatccgcatgggcaaaaaactgaatgtaagttttatctgtatggattgtgattaatcaggagatatcccggtagcagggaaagattcagggccgcaagtccgtgcaggacatgcggcctttttgcggtgattttgccatgggcgctgcggtccggcgtaatgtggctgagtacggatgaggcgtgagcatgtgcgggaccgcggatatgagctgcgggaacaaaagaaaggaattaaacctatggaagcaaataacgaaaatcccatcatccagctggtggggctggggaaacaatttcagaccatgaatggtccggtgactgccctggaagatatcaatttggaaatccggtatggagaggtgttcggtatcatcggcctgtccggcgcgggcaagagtaccctggtgcggtgtatcaattacctggaagtgcccacctctggaaaggttatatttgagggaaagaacctgtctgtgatgaaggacagggagaagcgtctggccaggcagtccatgggcatgattttccagcagtttaacctgctgtcccagagaaacgtgcttcagaatgtatgcttcccgctggagattgcgagggtatccaaggccgaggccaataagcgggcggaggagcttttgacactggtgggtctggaggaccggatgaaggcatatccggcgcagctctccggcgggcagaagcagagggttgccattgccagggccatggcaaccaatcccaaggttcttctgtgtgacgaggccaccagcgccctggatcccaatacaaccaagtccattttggaactgctcaagaagataaaccgggagatgggaattaccgtcattgccattacccatgagatggcggtcattgaggccatatgcgacagagtggctatcatagaccacagccacatcgcggaggcgggaaatgtgtccgatatcttttccggtcccaaatccgatatcggccgccagctgattctgggggatgtggctgagcagaacctgagttttggcaattcccgccagattcgcattatttttgacggaagggagtcttcagagcctgtgattgccaatatggtgctggcctgcaaggttccggtgaatatcatgcatgcggataccagggatattgaaggcaaggccatggggcagatgatcatacagcttccggaggacgatacggatgccggccggatttgtaattatctgaagacagccaatgtaaagttcgaggaggtgcggtgagatgcaatttgattctacgaccataaatatgcttgtaaaaggaatatgggagaccatctacatggtgttcctgtcctctgccttatcctatgtaatcggcattcccctgggaatcgccatggtggtgacggacaaggagggcatcagcccggtgcctctgtttaacaaggttctggggctcatcatcaatctgctgcgctccgtgccgtttattatcctcttaatcatggtattgcccattaccaagtttattgtgggaaagaccattggctccaatgccacggtggtgcctctgattattgccgcatccccatacatcgggcgtatggtggagtcttccctgaaggaagtggacgcgggcgtcatcgaagcagccaagtccatgggcgcatccacctggcagattatcgtcaaggtgctgctgccggaggccaagccgtccctgctggtgggtgcggccatatccgtgaccacgattctcggatactctgccatggcaggatttaccggaggaggcggactgggcgatatcgccatccgttacggataccaccgttaccagaccgatatgatgatggtgaccgtggtgcttctggtcattattgtgcagctgatccaggaggtcgccatgcgtatgtccagaaagagcgataagagaatccggtaggaaggtccgggaagtgaagccgggaagagaatccgctgaggctgtccgtttcctgacaatggcggaagaatgtatatgaccgtcatatgaagaagggtgtgcagcctgagctgatgataaatgcctgaatatggcgaaaataacaggggcagagccccaaagcgaggaggacacaattatgaagaaaaacatcttaggggcagccgtactggcagccatactggcatcgggagcgcttagcgcatgctccggcagcccaaaggagaccacggcagcagctactgagacgcgggctgctgattccagggcagaggataccacggccgcagaggcggagaccacgcaggccagtgcagaactgaaggaaatcgtggtaggagcaagccctgcgccgcatgcggaaatcctcaatgcggctaaggaagttctggcatccaagggctacgagctgaagattgtggaatacacagattacgtgcagcccaacaatgcgctggattccggcgacctggacgccaactatttccagcacaagccatatctggattcctttaatgagcagaacggaacaaatctggtcagcgcaggcgccatccactatgagccattcggtatttatgcaggcaagacagcatccctggaagaactaccggacaaggcgaccgtactggtgccaaacgatgtgagcaatgaggcaagagcccttcttctgctggaggcacaggggctgattaaactgaaagacggtgttggtctggaggctactaagaatgacattgtggagaacaccaagaacctggatatcgtagagttggaggcagcacagcttccacgttccatttctgacggcgatatcgcggttatcaacggcaactatgcaattgaagcagggctcaaagtcagcgacgccctggctactgaggattcccaatccctagcggctaccacctacggcaatgtagtggcagtgagagagggagaagaatccagcgatgccaccaaggctctggtggaagcattgaccagccctgaggtaaagcaattcatggaggagacatatgaaggcgctgtagtgccgctgttctaacgcgtgtttgcaggcagctttcaatcaaactctttcaagataaaatacagttattcataaaatcgtaagaggctgtccgccggggatataccctggcggattgttttattttacaaaatatgttatactttcccaaaagtgtgtcctgtattcggatacattgacgcagccgcaggggcttgagagaggagatagtccatggaaaacgaaaaagaaaacggatatggagccggagaaggccagggtccggattatcatacagataacagggaaccagtgattgtggcggaacagccggcccgggaggtgacagatggggatgtcagccaggcgtctggcggccaggatgcagcggatctgggagaaccggggcaaagcgggccggagcggggaaccgcgggctggggaaccgcggggcaaaatagcgccatccaggatggatccgatggatggagcagccccatggatgcacccccacgggaggacagatggagcgatacaggggataaaccttatctgggaagtccctgggaaccaacccaatccgggccggaatatgccccgggaaagaataatggcgccagcgcaaatgacagccggccgttatataagccggccccgccttcttacggccaaagccagccggaggcggggcagacgcagccggaaacaggccagggccagccgggtgcaggccagggccagccggaaacaggacagaggctgccagtgacaaatcagaaccagccgggcgggagcagccaataccagacccaataccagtcttacccgcctgtgtaccaggaaaagaataatatggcaacggcagctctggtcatggggattctttctctgtgcagtatctgctgctgtatgctgttcggcattgtgttcggcgtactcggcatcatatttgccattatgtcaaaaaaaggagacaaaatggacggtcaggcaagggccggactgatactctccattatcggtattgctgtcaccgtgcttgtcatcatcttctttgctgcgattgaggtgctcgctgtcataccggaactgaattgattggttgtttaatggatggaaaccgaattgatataaaatcaggttttaatgggacggtgtccggcatatagtaggtagcaagagaggccgggaggctgtggaccgtgaggatttacgaccttaaacaaaaagaagtgattaatgtaaagacctgcaagcgccttggatttgtgggagatgtggatttcgacatggaaacgggctgtctgctggccctgattgtgcccggaccaggctgcatatgcggttttttgggacgggagaaggaatatgtgataccgttctgtgacatctgccaggtgggaaacgatattatactggtggacattaaagaaaaagatgtgacggaaagcattaaatgctgaaaagaaacatacagcgcggattccagcgggattcgcgcttttttcagcgcgcgggacagaggagtggccgccagggtttcccctgccggccggtttgtgagaaaaagttgtataaaaagcatttgctttttgcaagtctaactatacaaatgaattgtgaaggttttatggtggaaatgtgaaaaatctgtgaagggtaccataaaatggtcacaggttttcgtggatggctgtcaggatgtccttcagctttcccgcttcaatctggcccggtgcagaggcttcttttacagagccaaaggtgaggcaggagccgaatacctcccctgaaagacggcttatgagcccggtgcccttcatggacatggttacgaccgggcaggacagggactggctggccttgtctgtggctgaaagaagggtcagcacatcgcgggctgaccggggcatgaccgcaatcttggctatgtctgcccccaattcctccatgtgatgcaggcggcggagaatatcatcctcttttggagtggccgcaaaatcatgattggacaggatgacgcgtacctggtgtctgcgggccagttccactgtctcacgtaccatatcgtcaccggaaaaaagttccaaatccaccagatgtacatggccggagcagatggcctgttccaccagggagcggtacgccgggagcggagcgggcacatggccgccctccctttgggtgcggaaggtaaagagcaggggaatgtctttcagggcagactccagaccgggaaggacctggtccaggatgtccggctccagtatggagtcaaaccagtccgctctccattcagccacatccacaggctgctccgtgaaggattctgcctggtgaatcagggattcgtaatccttttccaccagcggggcgcatattttcggcattccctgtccaagtacagtttgttttataataacatttttcatgataaagagcacctttcctgtaatctttttggatttgtctggattcattataaagcggagaggggatttcgtccataccgtaatgaaaaaagaacaaagtccttgcgattcatactttcttcggttaaaatatatgaagcgtttaagacgatgcgtgaaaaaagaaaggaagggtaacccagatgaaatgcccctattgtaatgaagcagacaccaaggtcatagattcccgtccggcagatgacaacagctccatacgcaggcgccgccagtgtgagcgctgcggtaagcgctttaccacctatgagaagctggagaccatgccgttaatggtaataaagaaggataattccagggagacgtatgaccgttccaagattgaagcgggaatcatccactcctgccataaacgcccggtatcaccccagcagattaattccatgattgatgagattgaaaaccagatttttaacatggaggagaaggaagtgcccacctccgccatcggagagctggtgatgggaaagcttaaggacctggacgaggtggcgtatgtgcgttttgcctctgtctaccgtgaattcaaggatgtgaatacgttcatagacgagattggaaaattgctgaaaaagtaaagttgctgaagaaaatagatttggaaggaatacttataaacatgctggaaatgttttatccccgccgttacgaggtatccacctatgtgataccgtttgattattatcatgcacagggaatgcagggcgtgatttttgacattgataataccctggtgccccatgacgcgccggcagacggacaggcagtggaactctttgagcggcttcgcgccatgggaatgaagacatgtcttctatccaacaataaggagcccagggtaaagccctttgcggatttggtgggttcctgctatatccataaggcaggcaagccggaagtcaggggatatgagaaggccatggagcttatggggacggacaggaatcataccctctttgtgggggaccagctgtttacggatgtgtacggtgccaacagggccggcatctacagtatcctggtaaggcccatggaccccagggaagagatacagatagtgctgaagcgttacctggaaaagccggtgctgtatttttataaaaaacatgccagagacataaaccaagacagggagtaaagtgagataatggacggaaagacaagagtatgcgggctgattgcaaatccggtggaacattccatgtcacccatgatgcataatttttttgcgcagagaacaggggtgaacttagcctacgttccttttaaagtggaggaagacagggttggggacgcggtaaagggggcctatgccctgaatatactggggatgaatgtaacggttccctataaacagcgggttatggagtttctgtctgaactggatgaggatgccagggccatcggggcagtcaatacactggtcaggacagctgcgggctataagggctataatacggatggcgcgggccttaagcgggcccttgcgcaagccggtatccggacagaaggagaacattgtttactcattggggccggaggtgcggccaaggctgcagcctatgtgctggcaaagggcggggctgcagacatccacatcctcaaccggaatgaaaccagggccagggagctggcagactgcatcaacacactgacaggcagcggtctggcggaggccctgcctctgaagggatacaggaagcttcctgccagaaaaggcggatatctggccgtacagtccaccagcgttggcatgcatccccatgtggaggatgccgttattgatgatccccggttttatgagatgattcataccggtgtggacattgtctatactcccgccaggaccaggttcatgaaaatggtacaggaagcaggaggaagggcggtgaacggtctggacatgcttttatatcagggcgtgattgcctatgaactgtggaatccccaggtgagggtggacagcgggaccataaaggcggcaaagcagatgatagaagattatctgataaaaaaacaggccggggagggccggggagagaacctgatcctcattggcttcatgggagcgggaaagaccagtgtgggagaacatttcgcagcacgctaccggatgccgatgattgacacggacaaggagattgaggcggcagccggtatggccatatccgatatatttgccacccggggagaggaagccttccggcgcctggagacaggcgtgctggaaaagctgctgaagcagggcggcaggtctgtgatttccgtgggcggcggactgcctctcagggcggaaaacagggcgcttttgaaacagctgggaaccgtggtatatctggatgtcctgccagagactgtcatggaacgaatcggagccgatgtgtcggaccgtcccatgcttcacggcagtgatgtgatgggccgcattataagccttctggagtcgagaaaaccctattacctgaaagcttctcatataattgtggatgtgaacggtcgggacgtggatgatatcgtggaagagattcaccgcagggcagtggataaaacatgctgaaaagggagaaatttatactgccgttaaaaaaaaacttgaaaatgctccctacatagtatagaatataaaagattaaagacttatggggcgcttaggcaagcgtcatgaacgaactcaaggaggaatatctttatgatatcagcaggtgattttagaaatggcattacactggagattgacggacaggttgtccagattatggaattccagcatgttaagccaggcaagggtgcggctttcgtgcgtacaaaattaaaaaatgtaatcaacggcggcgtggtagagcgcaccttccgtcctacagagaagttccctcaggccagaattgacagagtggacatgcagtatctgtatgccgacggagaattatataactttatgaaccaggagacctatgaccaggttgccctgaaccaggatatcatcggcgatgccctgaagtttgtaaaagagaacgaagtatgtaaggtctgctcttacaatggcagcgtattctccgtggagcctccgctgtttgttgagctggagattacagagacagagccaggtttcaagggcgataccgcaaccggcgccaataagccggcaaccgtggagacaggtgcaaccgtatacgtaccattgtttgtagaaatcggcgataagattaagattgacaccagaaccggcgaatatctgtcacgagtataatacaacttgtcggatacgccctgggaggcggtttgtaagaattgctccggtatatgccggggcagtttttaactttccgggaaaaggaaagacctattgtcacagtaaaggagagtatacattgtgaataagattctggatatgatggagcgggaattaaagcaggcatttacagccagcggatatgaggattcgttcgcaaaggtggttttatccaaccgtcccgacctgtgtgagtaccagtgcaacggtgccatggcagcggctaaggcatataagaagaagcccatcgatatagcgaaccaggtggtggaacatctggcttcaggcggctcccaccctgttttttctgaggcagaggctgtgatgccgggattcattaacctgaagctgtcagatgcgtttctggcagagtatgcgggggccatggcttcggcagataagctgggactggaagcgcctgagaagccggagacagttatcgtggattacggcggggccaatgtggcaaagccccttcatgtgggccatctgcgggcggccattatcggggagagcataaagcgcatgggccgtttcctgggccaccatatgattggtgatgtgcatctgggggactggggactgcagatgggtcttattattgaggaactaaaggacaggaagccggagctggtgtattttgacgaatcctttgagggaccgtttccgcaggaggcgccgtttacaatcagtgagctggaggagatatatcccgcggccagcgccaagtccaaggtggacgaggtgtttaaggagagggcccatcaggcgaccctgaagctccagagaggatatgccccgttccgggcaatctggcagcatatcatggctgtctctgtgtctgaccttaagaagaattacgcaaacctgaacgtggagttcgatttgtggaagggtgaaagcgacgcggagccctacatcggggacatgattcagatgctggtggataaggggctggcctatgagagccagggagctctggtggtggatgtggctcaggatacggacaccaaggagattccgccctgcctgatccgtaagtccgacggagcgtctctttatgcaacttccgatttggccaccattgtggaacgggaacaggattttaagccggaccgctatatttatgtggtggataaacgccagggaatgcactttgagcaggtgttcagagtggctaagagggcaggtattgtgaaggaagacacccccatgattttcctgggattcggcaccatgaacggaaaggacggaaagccctttaagacacgtgagggcggagtcatgcgtctggaaaagctcattgaggaaatcaatgaagccgtataccagagaatcatggagaacaggaccgtatcagaggacgaggccaggagcacggcggcagtggtagggctggctgccctcaagtacggcgatctctccaaccaggctgccaaggattatgtctttgatattgagcgctttacctcatttgaaggtaatacaggtccgtatatcctctataccattgtcagaatcaagtccattatcgccaagtacagggagaacggaggccaggtaagccaggatgccgttgaaaagaagattcttgcctgcaccggaagttcggagaaggctctgatgctcttgctggccagatataatgaggttctggaaaacagctttgcggagacagcgcctcataagatatgccagtacatttacgagctggccaatgccttcaacagcttttatcatgataccaagattctggcagaggaggatgaagccaggaaggagagctatatcggtcttatttctcttaccagacgggtgctggagtcctgcatcggactgttgggaatcgaggctccggagcgcatgtaaccgcggggatgtcccgggatggcctgatacgttccgccctccggggcaggggtatcaggaatcccgctgaaaggatgcatgaagcagatgaagattgtcaggatgaacaccagcagcttctggaagggggaggctggtgtgaaaggcctggttgaagaccagggggaaacatttgaggtaaatttatatctgggaagcggaagagtaagggattactcctgttcctgcagcaaagggaattcttacaggggaatgtgcgcccatggggaggccctttttgcgtattataatcagcagagggaggaggcgtccaaaccaacaattcatacatcctcccaggttcacaccatgattcgggaatataccaaccgggaggtggccctgattctggcggaggaggcggacgcccaggtaaggctggagccggtgctgattctggacggaaaggacacgcgtctggagttcaaggtgggaatcacccgtttttatgccgtgcgcgatttgagggcctttaaggaggctgttgagaatggggcccatgtggcttatggaaaggacctgtcctttcatcacaacaaatcggcttttacagacagcagcaaggagcttctggccctgcttatgggaggagtacaaaaccagaaagcggtccgcagcctgacgctaaaccgtatgaaccgggaccgcttttttgaaataatggccggccggaccgtggaggtccagcttcccggcgggaaccgggtcatgatggacatggaggattctgatccggtggcatcacttaaggtggagaagacggggagggacggcctgaaagccagccttatgggtgtggctccaatgataggaggcgaggccccaaggccggtggccggctgctttcgcggggagcggttcctgtatgtggtatccggccagaggctctaccggtgcagcgagtcgtgtacccaggtcatgggactgttcatggagcagatgtgcatggagcgggatgaaagcgtgatggtgggacagagggatattccgctgttctatgagcgcgttgtcaagcatattcttccctactgccgcctgatgccggaggacgtggattttaaggattatgagccggagccgttaaaggcgtccttccggttcgacacaggggaggatggagctctggtgatggagccctcacttgcttacggaagttatgaattccatcccctggaggacgagaatcttcccaggactatatgccgtgatgtaccgggggaattcagggtaagccagctgattcataaatatttcaagtacaaggacccggatggaagacggctggtcataaggaataacgaggatgagatttaccgtcttatgacagagggaatggacgaattccgctccatgggagatgtatatgtgtctgagaacctgcgccagtgggaggtgctggcgccgcccagggttactgtgggtgcttctgctgccggcggctggctggaactggatgtggacatgggcggcatgaacagccaggaactgaaccgtatactggcagcctacagccagaaaaagaagtactacaggctgaaaaacggacaatttctggggctggatgaaggcggcctaacggtcatcagccgcatggcgtcggaaatgggagtaaccagaaaggagcttcagagcggaaaggtacgtctgccggcttaccgcgccttttatctggattatcttcttaaggagagcaccggtgtaacctattacagggaccagatgctaaaagccatggtaaggtcggtaaagtccgtggaggacagcgattttaccgcgccggagagactgaggggcgtgctgagggagtatcagagaatcggatatgtctggctgcggaccctggacagttacggattcgggggaatcctggccgatgacatggggctgggaaaaaccatacagatcattgcacttttggagtccgcctatggctcaggcgaacagtcgccgtccctgattatatgtccggcttctcttgtgtacaactgggagcatgagatacggcgttttgcgccggaccttaaggtgctgtcggtggtgggaagcggttcggagcgggaggacctgttaaaagaagttggaaaaaattcccaggtctatcaggttattataacgtcctacgatttgctgagaagagacataggcttatatgaaggcgtccatttccggtatcaggtcatagacgaggcgcagtatatcaaaaacgcatccacacagagcgccagggcagtgaagtccctggatgtgcagaccaggtttgccctgacagggacgcctgttgaaaaccgtttgggtgagctgtggagcatttttgattatctcatgccgggctttctcttcggaagcaagttcttcaagaaggaatatgaagtccccattataagagacggcgacgcggcagcccttgaacgtctgaaacggatgataggcccctttgtgctgagacggataaagaaggatgtattaaaggagcttccggataaaatggaggaggttgtatattccaactttgaaccggaacagaaaaaattatatgcggccaatgcggccaagtttaaggaaaagctcagtacaggctgttttggccgggcaggggaaggaaagctccagattttggcggagctcatgcgcctgagacagatttgctgcgacccgcggctgtgttacgacaattacagaggcggttccgccaagctggagacctgtatggatttggtgaggagaggtgtggcgggaggacataagatactgttgttttcccagtttacctccatgctggatatcattcatataaggtttgagaaggagggaatcaagagccacttactgacaggggccacctccaaggaggaacgaatccggctggtgggggattttgggaaggatgaggtgccggtatttttgattagcctgaaggcggggggaaccggccttaacctgactgcggcggatattgtcatccattatgacccgtggtggaacgtggctgcccagaaccaggccacggacagaacccaccggatcggccaggataagcaggtaacggtctataaactgattaccagaaataccatagaagagaacatcttaaagcttcaggaagccaagagccatctggcggatgcagtggtgcctgagggcacggtatcatttggaagcctgacaagagatgatatactgaatatcataaaggaggaataagaaatgaaagtattaatgttaaacgggagtcctcacgagaagggatgtacttacaccgcccttgcagaggtggcaggagagctcaatcaggctggcattgaaacagagatcatgcatgtgggcggcgggactgtccatggatgtatgggctgcggcgcatgcggtaagcttggaaaatgcatttacagcgacgataaggtcaacgaagcagtggaaaagatgaggcagagcgacggactgattgtcggttcaccggtacactatgcctcggccagcggggctgtcacctccttcctggaccgcttcttctattccggaagcagcgctgctgcccataagccgggagctgccattgcctctgccagaagggctggaacaactgccaccctggaccagctgaataaatattttatgattacgcagatgccggtagtttcctcccagtactggaatatggtgcacgggcaatgtcctgaggatgtgaagaaggatgaggagggcatgcagatcatgcgcgtcctgggcaggaacatggcctggatgctcaaatccattgaggcaggaaaagctgccggggttacgcttcctgagacagaggagaagaagagaacgaattttatacggtaggaaaatggctgattcgcggatgaggttaatgtatggaatcaatacgaggaatcaatacatggaatcaggatgacctggtttaagatatggggcccggcacagtggtgtgccgggtttttaacatgctcgtatgtacggctctataccaaagcggtatgcatggtctgattatgaatgtgctggtccagtatcaaatggacccgttccacttcgccgagaatcagggtttcggatttcatgatttggcttcttaagatgcgttcagtggacttgagctggaattccagattgtccatgcgggtgttcagggattttatgtcggactgcatgttttggatgtcggactgcatgttttggatgtcggttttcatgttctgaatatcggttttcatgctctgaatatcagttttcataccttgaagctcagtcttcataccttgaaactcagttttcataccttggaactcagtcttcataccgactatttcaatcaacaaaaaatcaagtttttcagaatatgtcaagctgtcacctcctaaaaacagtgtgctgtgtcacggttattgtttcagctggaaccagggtgtaattaagtatagcatatcaggacatggaaaaccaggctggtttttgcacttttggtaacatatttcaccggattacgccgccaatttcccggaaaaatagtacttgccacaaatcccgtattctgttatactctgatatagttaactagctaattataagcgggctaatggttaatcagttaaatatacagatacaggaaggaggcaatttacatggacaatgcatcatgcagttgttttgttcaatcctcggagcactgtcttatcgagaagtacattcgagtggccaggctgcaccggagtatgatggagcaccgtctggacggcacgggggtgtaccgcagccagcatcagattctgatgttcgtgtcggataatcccaacgtatcccagaaggagctggcaaggatgtatggcgtgtcaggggccaccatagctgtttctcttaagaaactggaaaagggaggctatataaggcgcctggtagaccaggaggacaaccggtgcaaccagatttgcataacggataagggcagaaaagtggtggaggacagtgttaagattttcaggcgcattgagtgccgtatgtttgaaggattctctgagaatgatatgaaggtgctgggagaacttctggaccggatttatggaaatctgaaccaggagtttacggacagggcgcaaggggaggaatcgtaagtgaaacgatacggaaaatatataaaaccatattttggagcctttattctgggccctcttctgatgctgactgaggtggctggagaaatcatgctgcctaagctgatgtccatgattatcaacaacggagtggcgcagagaaatgtgcagtatatcctgtctgtgggaggcctgatgatactggccaccctggtcatggccataggaggaatcggaggagcttatttttcggtgaaagcggccgtcagctttaccagtgatttgagggccgaccttttttccaaggtgcaggaattttcctttaagaacatagatgcctacagcacaggctcgctggtaacccgtctgaccaatgatatccagcaggtccaaaatgtgcttatgatgggactgcggatggccatgcgcgctccgggcatgttcataggtgccctgctcatggctttcatgatgaatgccaggctggcagtggtcatactggtggtcatccccctgctgacagcagccatagccgtcatactgaagaccgcgttccccagatttaccgccatgcagaaaaagctggaccagttaaactccggcatccaggaagctctgaccaatgtgcgggttatcaagtcctttgtgcgggaagaatttgaggaagataaattcagggtcatgaaccaggatttaaagaacagcagcctggatgccatgaaaatcgtcattgtcgccatgcctgtgatgacccttgccatgaacataaccacgctggctgttgtgtggtacgggggaaatatcattattgcaggggatatgccggtaggggatttgactgcatttaccacctatatcgtacagatactcatgtcactaatgatgctttccatggtattcctgcagctttccagagcagtggcatccatccgcagggtgagtgaggtcatggatacggagatcgacctgacagaccagggggccgccaggaaggacctggctgtattgacgggaaaggtggagtttaagcatgtgagcttcagctatacggacaaccaggatgagatggtgctggaggatataagctttacggcagagccggggcaggtgataggcattatcggagccacaggcagcggtaagaccaccctggtgcagatgataccgcggctctacgatgccacaaggggccaggtacttgtggacggagtggatgtcagggactattctctgaaaaaccttcgggaaggtgtgggcatggtgctccagaaaaatgtgcttttctcaggcaccatagaagagaacctgcgctgggggaaggaggacgcctccatggatgaaatcagggaaatggcacagagcgcccaggcggacagctttgtcacctcctttaccaacggctatgatacggacatgggacagggcggggtcaacgtatcggggggccagaagcagagactctgtattgccagggctctgcttaagaggccaaaaatcctgatactggatgacagcaccagcgccgtggatactgccactgaggccaggatacggcagtgtttcagcaccagccttaaggataccaccaaaatcatcatagcacagcgcatcggatccgtggaagaggctgaccggatcttggtgctggatgaaggcaggctcatcggacaggggacccatgaacagcttatggaggaatgccaggcataccaggagatttattattcccagagggaccgaaaggagacggctgcatcatgacgagacaacagaaagcggagagcctgaaacggcgctatggaagacatggggctcctgagtccataggtcccatgggagggagagggcatggaccgggacggaatatgggcatgggcccgaaacggctgcccaggaacgcaggcaccaccaccaggcgtcttctgcattacttaaatgaggataaacccaagatggtgctggcatttttctgcgtcatcctcaataccgccgcaacgctggcgggttcctacatgctgcgtcctgttatcaatacattcattgcccctttaacaggagagcctggtgatccggcaggacttgcaagggccctggccgttctggcggctgttttcgcggtgggggtgtttgccaattatgcccaggcaaaggtcatgctgaccgtggcacagaatgcccttcagaaaatccgcaatgacctgtttgccagaatgcagaagctgccggtacggttttatgataccaactccaacggtgatttgatgagccgttttacaaatgatgtggacaccatcggacagatgctcagctccacgctggtacagttgttttccggggcattaagcatcatcggcaccctgttcctcatgctgtacaccaacctgattctgacccttgtcaccctggtgatgattcctgttatgatgaaggcgggaggggctgtggccggatggagccagaaatacttcactgcccaacagacatccctgggagccgtgaacggttatatagaggagaccatcaccggacagaaggtggttaaggtattctgccacgaggacacggccagggaggaattcggcatactgaaccatgacctgaggtacaaccagattcgggcccagtttttcggcggtattatggggcctgtgatgaacagtctgagccagatcaactattcccttaccgcctgtgtgggcggcctgctctgcgtgctcaggggctttgatgtgggagggctgaccgtgttcttaaacttttccagacagtttagccgtcccatcaacgagatatccatgcaggtcagcaatgtattctcagctctggccggagcggagcgcgtattctcggtgatggatgaggagccggaaccggcggacaccatggactgtgtggtgccaagtcccatggttggccatgtggtgtttcatcatgtcacctttggctacgacccggataaaaccattcttaaggacataaatctctatgccaaacctgggcagaagattgcctttgtaggttctaccggcgctggaaagaccaccattacaaacctgctgaaccggttctatgacatccggtcaggaaccatcaccattgacggggcggatatacgccgcatttccagggacgccctgcgaaacaacattgccatggttctccaggatacccacctgtttacaggcacggtgcgggagaatatccggtacggcaggctggacgccacggacgacgaggtcgtccaggcggccaaaacagcctccgcccattccttcatcacgcgtcttccccacggatatgataccatgctggagggggatggggccaatttaagccagggacagagacagcttctcaacattgccagagcagccatatccaaggcccctgtgctgattctggacgaggctaccagctctgtggataccaggacggaaaaacacattgagcacggtatggaccggctgatggcggaccgcaccaccttcatcattgcccaccggctttccacggtgcgcagcgccaacgccatcatggttctggaacacggggaaatcatagagagagggacccacgaggagcttttggagatgaaaggacgatactatgaattgtatacaggcatgaaagaactggattgattgccatgaaattaacatataaattaaaataataacgaataaaatctgtattgtatacaatctttatttatgctatacttagttggtgtattccggcgggggcaggcagccccaccggtcataccggacgctggaactggtccggccgcacaaaggaataaaaagaaagaaaagagggagagaatccatgggtttggcgacttttataggcggcatccatccatatgaggggaaagagctgtcagagaacaaaccggtacaggtcctgatgccaaagggcgacctggtgtatccgatgtcacagcacattggtgcgcccgcgaagcctctggtggcaaagggcgaccatgtactggcaggccagaagattggagaagcaggcggtttcatctctgcaaatgtaattgcttctgtttcaggaacggtgaaggccattgaaccaaggcgtatggctaacggagcaatggtgccctccattgtcgttgaaaatgatggagaatataagacagttgagggcgtgggagaggacagggacccatccggcctgtcaaaagaggaaatccgtaacattgtaaaggaagccggtatcgtgggcctcggcggagcaggattccccactcatgtaaagctgactccaaaggatgagagcgccattgagtacatactggttaacggcgcggagtgtgaaccgtaccttaccagcgactaccggatgatgttggaagagccggagaaaatcgtgggcggcttaaaggtcatccttcagctttttgacaatgcaaagggcgttatcggcattgaaaataataagccggaggccatcaagaagcttaccgagatggtgaaggacgagccgcgcatcacggtctgtccgcttatgacaaagtatcctcagggaggtgagcgttccctgatttatgccgttacaggcaggaaggtcaactcatccatgcttcccgcagacgcaggatgcatcgtggataatgttgacaccgtgatttccatttatatggcagtgtgcaagtgcacgcctctgatgagaaagatcatcacggtcaccggagacgcggtggcggaccccaggaatttcagcgtaaagcttggaaccaattaccaggaactgttggatgcagccggcggttttaagacggagccggaaaaagttctgtcaggcggccccatgatgggccaggccatatttgacctgaatatcccggtaagcaagacttcatctgccctgacctgtttcacaaaggaccaggtggcggagatggagccttccgcatgcatacggtgcggtaaatgtgtcagtgtatgtccaagccacatcatccctgtgatgatgatgcaggccgccctcagggacgactgcgagacatttgagaagctgaacggtatggaatgtatggagtgcggaagctgtacctacatatgtccggccaagaggcctctgactcaggcatttaaggaaatgcgcaaaacagtcgcggctaaccgcaggaagaaagggtaggaggggacataagtcatgagtaaattattaaacgtatcatcatccccgcatgtgagaagccatgagaccacccacagcatcatgctggatgtggccattgccatgttgcctgcaactgctttcggtgtgtatcatttcggcatgcatgcgctgctggtgcttatagttacggttgcggcctgtgttttaagtgagtatgtatatgagaagctgatgaagaagcaaagtaccgtcagcgactacagcgccctggtcacgggcatgattctggcactgaacatgcctccggagattccggtgtggattccggccctgggcggaatctttgccatcatcgtggtgaagcagctctacggcggcctgggacagaactttatgaacccggctctggcagccaggtgtttcctgctgatttcctttgcgggaaagatgaccaatttcagctacagcggatttgacggcgtgtccggcgcaacacccctggcagtgcttaagagcggcggggcagtggatgttccggccatgtttgtgggaaacatcccgggtaccatcggagaggtttccgtgattgcccttttaatcggcgctgcttatcttctggcaaagaaggtaatctccatccggattccgggtacctacatactgacggttgttgtatttgccatcctgttcggaggccatggatttgatttaaactacattgcggcccacctgtgcggcggcggcctgattttcggtgccttcttcatggcaaccgactatgtgaccagccccattactccaaagggccagattgtgttcggcatcctgttgggcgtgctcacagggctgttcaggattttcggcggctccgcagagggcgtgtcctacgcaatcatcatcagcaacatccttgttccgctgattgagaaagtaacccttcccaaagcatttggaaaggagggcaagtaaacatgagcaaatcaggatttatgaaagacgcggtgattctctttgcaatcaccctggtgtcaggatgccttttaggcggtgtataccagctgaccaagaagcccattgagctggctaccatagcggccaacaacaaggcatacaaggcagtgttcccagaagccgagacctttgatttggacgaagcccttacagcagccatcccggcctgcaacgaagccctggccggcatgaatttcggcggtgtggaagtggaaaacgtgttaaaggcagtggacgcaggcggcagccagttaggctatgtcatcacctccctgtccaatgacagctacggcggcgtggtgaagctgtcggtgggactgaaggacgacgggaccatcacaggcatcgagttcctggaaatcagcgatactcccggtctgggattaaaggcaaaggaaccggcgttcaaggaccagtatgtgggaaagaatgcacctgagctttccgtcaccaagtcaggcagcgcggatgatacccagattaatgccatcagcggcgctaccattacttcaagtgcaacaaccaatgcagtcaatgcagctttatattacctgcataactgcatccaataaataggaggtgggaacatgaataaatgtacagaacgtttatataacggtattgtgaaagaaaaccctaccttcgtcctgatgcttggtatgtgtccgacactggctgtcaccacatccgccatcaacggtctgggtatgggactttccacaaccgtggttttactgttttccaatatgattatctctgccctgcgtaagatcatacctgacagggtacgtattccggcgtatatcgtcatcgtcgcatccctggtcaccatggtgcagctgctgctccaggcttatgtgccaagcctgtactctgcgcttggcatctatatcccgctgattgtggttaactgtatcatccttggccgtgcggaatcctacgcatccaagaacggtccggtggtatccacctttgacggccttggcatgggccttggattcaccctggctttgacctgcatcggtctggtccgtgagattctcggttccggagccatattcgggaacgtggtggtcccggaagattaccatattgctatctttgtgctggctcccggcgcgttcttcgtgctggcgctcctgaccgcgcttcagaacaagttcaaagcgccgtccgcaaccaacggttccgtgcctcagtccaagctggcctgcggcggaaactgtatgtcatgtaccggctctgcctgcatggctaaccatgaggcgctggagacgaggatgcgtcaggccgaggaaaaggctctggcggcaaagaaggcagctgtagcaaagaaggaagcagagcttaaatcagctgcttccaaaaaagaaaattaggagggtggatagatgaaagagttattattaattgccattggttccgctctggttaataacgttgttttgagccagttcttaggactctgtccattcctcggtgtttcaaagaaggttgagacctcagccggcatgggtgcggccgttatcttcgttataaccatagcatcggcagtgacaagcctggtttataccggaattcttgtgaacctgcacctggaatacctgcagaccatcgtgttcattctggtcattgcggccctggttcagttcgtggagatgttcctcaagaaatccatgccgtcactgtatgaggccctgggcgtgtacctgcctctgattacgaccaactgtgcggtgctgggtgtagcccttaccaatgtacagaagtcatacagctttatccagagcgttgtgaacggcattggtatttccgttggctttaccatcgctatcatcatgctggccggtatccgtgagaagattgagcacaatgatgtaccgtattcattccagggctcacccattgttttaattacctcaggtctcatggcaatcgcatttttcggattttccggattaatttagaaggaggagaaggaaaatggttacaggtatcatattagcggcagcggttgtaggtatccttggtattcttataggaatcttccttggcgttgccagcgagaagtttaaagtacaggtagatgaaaaagagattttggtccgcaacgagctgccgggaaacaactgcggcggctgcggttacgcgggctgtgacgccctggcaaaggccattgcggccggtcaggcggatgtaggggcctgtcctgtgggcggtgctcccgtagctgagaaaatcggcgagatcatgggagtggccggcggagctgccgaaaagaaggtggctttcgtcaagtgcgcgggaacctgcgacaagacaaaggtgcagtacaactactacggcgtggacgactgcaaaaaggtgtcagtggttccgggtgcgggagaaaaggcctgtgcctatggatgtatgggctacggctcctgcgtgaaggcctgtgcctttgacgccatccatgtggtggacggcgtggcagtggtggataaggaaaaatgtgtggcctgcggcatgtgcgtggcctcctgtccgaatcatctgatagagctggttccttataaggcagagcatctggtaaggtgcagctcccacgacaagggcaaggatgtgaaggctgtctgcgcggccggatgtatcggatgtaccctgtgtacaaagcagtgtgagttcgatgccatccatatggagaataacctggctgtcattgactacgagaagtgtaccaactgcggcaagtgcgcagaaaagtgtcctgtcaaggcgattgtttagaaaagataacgatgtttacatgaataaaaagctgtccctcctgcgcttgtaatgcgcggaagggacagctttttgctgcttcaatatgttattttcaatatattatattttcttcctctttttaaatgccggcgaatcaaagaactggtcgtcaggcaggaccttcttagtggtggcctcaaccagattgtcgtagcaggagaagatggcgtttatgtcgcggctgtccatcctgggtgtcagcaaggacaccagaggaacgataatgagtcccacaatcatggagacggcacccgcattgatgggggatgcgatatagtgcaggaacatatttgaaacagtgattccgatgccggtggcaaagctggcccacacagcagcgggggtggtccttttccagtacaggccgtagaggaagggggccaggaaggctccggccagggcgccccaggagatacccatgagttgggcaatgaagtcaggcggatccagggccagcacaacgcttaggacgatgaacgccacaatcaggcactgcatcagtaccagctgggtcttatccttcatgttcttcacaagacagcccttgatgaagtccagggtcagggtggagctggaggtcagcaccagagaggaaagggtggacatggatgcggacagcaccagcatgacaacaattccaatcagcaggtccggaaggccggacagcatggccgggataatggtatcataggccacggacccatttccattataaatggcaggactgtcaaagagccggccgaaaccgcccaggaaatagctgccaccggagatgacaacggcgaacagggtggaaatcaccgtaccagtggcaatggctttctcgcttcggatggtatagaacttgtgaatcatctgcggcaggccccaggttccaagggaggtgagaatcaccacgcccagcaggttcaggggatccggtccaaagaaggaggtataggctcctggctggcccagggtaaccgggacctcactgggaatctgcgccagcctgcccacagcggcgctaaagcctccctggccgttcaggacgctgaggatgacggcggcaatgccggccagcatgatgataccctgaatgaaatcattgatggcagtggccatataaccgcccaggatgacatagacggcagtcaggacagccatgcccattacacagacactgtagggaatatcaaaggccatgccgaataaccgggacagaccgttgtagacagaggccgtgtagggaatgagaaacacgaatataatcagggaggcagcaatcttcatgccctggctgtggaaacggctgccgaagaattccggcatggtggccgaggagagatgcttgctcatgaccctggtccgccggccgaggatgacccaggccagcaggctgccaatcagggcgttgccgatgccaatccaggtggaggccaggccgtatttccatccgaactgtccggcgtaaccgatgaatacaacggcggaaaagtaggaggtgccgtaggcaaaggcagtgagccaggggccaacgccccttcctcccagtacaaagtcattgacattggtggcatgacgccgggaatagaatcctacccccagcatgatggaaaaaaagacgaccagcatcagcagttttacagtcatttgaatatcctccgcatacactttaataattaaaacttctgaactttaatgtatcaaagcgaaggggaattgtcaaagggaatttcttgtttttgtctactttggctattttgacggaaaccagtggaagaggttggtatgatgaatgccattttttcgataaagtggggattgaatgccaaatttcgacataaaatgtaaaaaccagatatggatataaagtgtaaaaaatgaataattaaggtaataaatgattgacataatataaattacaaaaataggaaatcagataacatgtttaaaaattaataataatgtaatataaatgtaaaggcgggtccggcaaagcgtacaatatatagataggtttatctggaaaactatagtaaatatataaaaaacattacaaatgtttcaaaagtaagaaaaaatgtaacaaaaatattaaatctccattgacgtgaaaagtcaaatcccatataattagccatacatcccggaaaaacatgcacaaagtgggagatgcccactgcataaaattttgagaatggtacccgtgcagagttgtgcgggaccaggaaagaggagtatgtatgcttacattacattcattccttcgttcggtggttctctttgttaagtcactgactgtgaaagtgacaaagcagatgtaccgttcctcatctgtggtaatggccggtatgatggtagtggccatcatagcattttcagccaatgggtttggcggagggggaagaaacgcccttgcggcgcccatgacagaggaaagtgatgccattgacaagcaggaagaggaaaacgaaggaagcggtctggttactgaagcaaaaatacaattcggacttttaaatacagacagcgaaggccagcatctggccggtgcgctgctggaagcggatgtccgagaaaaacagagaaagcaggcagcggcacagacccagattgagacacttcagaaacagatattaaaggagagacaggaagaggaagccaggaaaaaggcggaggaagaacgccgggcagccagaaggattaaatatacggatgaagattaccaggtgctcctgcgcattgtccaggcggaagcaggcatctgcgaccccaagggaaaaattttggttgcggatgtaattattaaccgtgttttgtcgggaaaatttccggacagcgtaaaggcggttgtataccagccatcccagtttcagccggtatccaacggcaccatcaacacggtaaaggtcacggcggaaaccatagaatgcgtggaccgtgccctggccggtgaggattattccaatggagccctgtattttatgaacagaagggcgtccggcagcgccgcttcctggtttgacaggcgtctgacctacctgtttgcccatgacggtcatgaattcttcagataatcacccagaactgatctgcaggatacaaagagacgtgaaaaggcgccggggcggctgtaaaaaacagctgtaataaaaaaaaggattgagtttcctgtggctttaggtgtatactggaaattggaaaatcgaaacgccacaaaggagaatggaatatgatttttgatgagaagaagaatttggacttttacaggaatttagggattgagggcagatatgccaaggccgtggatttccttaagaatacggaccttgaggcattggagccgggaaagtatgagattgacggcaagaacgtatatgccaacgtaacagcctacaccaccatcccgtgggaggaggctaaatatgaggcgcatgagcattacaccgatatccagtatgtgattgaggggagcgaaattatgagctatgcgccggtacatgagatgacagtaaaggttccttataatccggataaggatgtggtactatttgagaacaccacccccggacttcaggttgtgaccggcgccggacagtatctgattttcaacccgtgggatgctcacaagccaaaggctgccaacggagagccggcacctattaaaaaggtgattgtaaaaattaaagaggattaaaacgcatcataaaacgcgcggtcaagaaagcgcgggaggaaagtccggcttgctgtattccgaatcagcgggccggacttttttctgccctcagagcttcctttcatgtttgctaatattttgttaattggaatattgacttttaattcacaaaatgagataatgaaaaagatttcgataaaatgaaagagaggtaaatgaatgatggcaaatgtagatttgagtcagtatggtattaccggaaccacagaaattgtttataatccttcctatgagatgttatttgaagaagaaacgaaaccaactctggaggggtatgaaaaaggccaggtaagcgagcttggtgcagtaaatgtcatgactggtatttatacaggccgttcccccaaggacaagttcattgtcatggatgagaactcaaaggacactgtatggtggacaacggatgcgtacaagaatgacaatcatccggccagccaggaagcatgggatacggtaaagaagattgccctggaagaactttctaacaagagactgtttgttgtagacgcattctgtggagcaaacaaggatacccgcatggcaatccgcttcattgttgaggttgcatggcaggctcatttcgtaaaaaacatgtttatccagccaagcgcagaggaactggagaacttcaagccggatttcgttgtatataatgcatccaaggcaaaggtagagaattacaaggagttaggtctgaattccgagacagccgcaatgttcaatatcaccagccgcgagcaggtaatcgtgaacacatggtacggcggggagatgaagaagggtatgttctcaatgatgaactactatctgcctctgaagggcattgcttccatgcattgttctgccaacacagatatgaacggtgagaataccgcaatctttttcggactttccggaacaggaaaaaccactctttcaacagaccccaagcgtcttcttatcggtgatgacgagcacggctgggatgacaacggcgtatttaacttcgagggcggatgctatgcaaaggtcatcaacctggataaggattctgagccggacatctacaatgcaatcaggcgtgacgctcttttagagaatgttacacttgacgctgacggcaagattgattttgatgacaagagcgtgactgagaacacacgtgtatcttatccgattgagcatattgagaagattgtccgtccggtatcagctgctcctgctgcaaagaatgttatcttcctgtcagcagatgctttcggcgtacttcctccagtatccatcctgactccggagcagacacagtattacttcctgtccggatttacagcaaagcttgccggtacagagcgcggcatcacagagcctacacctacattctcagcctgcttcggacaggcattcctggaactgcatccaaccaagtatgcagaggagcttgttaagagaatggagaagagcggcgcaaaggcatacctggttaacaccggctggaatggaacaggcaagcgtatctcgattcgcgacacccgcggcatcattgatgcgattcttgacggatccattgcaaaggctccaaccaagcagcttccattctttaactttgagattcctacccagcttccaggcgtagatcctaagattcttgatcctcgggatacatacgcggaagtatcccagtgggaggaaaaggcaagggatctggcacagcgctttgtcaagaactttgcaaaatacgagggcaatgaggctggaaaggcactggtttccgccggtcctcagttataataaaaagaaccgcctttctgcccgatcggcaggaggacagcatcatatagggagaaccggatatcggaccgcaaggtccggctgtccggttctcctttttatatggccaggcgcggtgtgatacccatagagctggcatttcttaatattttaatctttttcttaagtcttatttatgtccattgaaaggctgtttttttcatggtaccatgaagctataaagataggaggatggggttatgaaaaaatggaaaacggggcgcatatggacgctggtcacggctatggttcttctggcggcgctctctctgtctgcctgcggcagcaaatcgtacaatacggctgccatggcagagaccacggctgccgccgcatatgttatggatgcggaggaaggacagacagacgcggcctttttgggagaaaaccttaatacattaaaggcagagtccggaagcggtctgtctccctcatcagatattggcagtccggcagataccggcaggaagctgatacgggatgtgaacatgagcgtggaggccagggactttgacggcgtactctcgcagattacagacaaagtaagggagctgggcggttatgtggaatcctctgatgtgtcgggaatcagcgtcaattcctatggcggcagccagcagcgctatgcggacatcagggccaggattccggctgaccggctggaccgctttgtggagactgtggagagcgcggggaatgtgaccagcaagcaggagcaggtgacggatgtgaccctgcagtattcggatgtgcagagccgcaagaaatcgatggagatagagcaggagcggctttgggccctgttggagaaggcggagtccctggacgcggtggtggcgctggaagcccggctctcagagatccgctacgagctggagtcctacacatcccagctgcgtctctatgacaatcaggtggattacagcacggtatccatcaatatgagggaggtaaaggaccttactcccaccgcgccggacagcattggaaccaggatacagaagggctttaaccggagcctgaacaacctgggggaggcgggaaccgatctgattgtatggattgcctccaacagtcccatcctgctggtgctggccgtcatcatcgcggcagttgtcctcattgtcagagggttaagccgaaggacgcagggcaggctccgcttcctgagccgttcctctaattctcgcggtaagcagattggagagaaaaaaggcagaagagaccggaaggcgcaggcggcggaagaacagacggaaaaagcggtggaagagcagacagagaatcggaagacgcaggaggaacaaactgagaagatgcagaaagagaaagaatagccgggcttgtgtcctgtctttttatagcgtatacttatagtaataatccattcaaagccatacaagcccagtgaaaggaggcacccatgcagctcacctatctgcacatccataattttaagtcgatacggagcatggaaatacgcgatattgaccgggcgctgatttttgtaggaaaaaataatacggggaaaacctcgattctggatgcggtctgcgcggtgtgcggctgttatgagatccaggccagagatttcaatgagaaccgtcaggccatccggattgacgcctgcttttccatagaagaggaggaactgcacctgtttcatcatatgggtattgtcagccagtacaggcgttacgatgtgtggcgcagggtgttttctgagcggctgccgtcctttaaagacggggagctgtcctttactctgcatgtgaaccaggacggcaaggtgcggtatgaggatttgtaccggaagaataatccatatatccatatggtaatgccccgcatttaccgaattaacgcggagcgggagctgaaccagctgcagaacgaccttctgatgttccaggaggatgaggagctgcgaaggctgcgctccggcagctgtatttttgagagggctaagaaatgcaaccattgcttccagtgcatcggcctgattaatcagaagaagccggaagaactttctgcctttgaaacagcccgtcttctggagtttaagatataccagctgaacctgatcggattttccaggaaggtcaatgaaaacttctttaaaaatggaggatatgaggagattcagtacacgctgaactttgatgcggaccagctttttacggtggaggtaacggcccacaaccgccagagaggcagcgtgaagccggtggagctgatgggaaagggcatgcgcagtatttatatgctgtccctgttagagacctatatcagtgaacagggcaggattcccagcattatcgtggtggaagacccggagatattcctccatccccagctccagaaatcctgcagtgagatactgtaccgtctgtccaagaagaatcaggtgattttcaagacccacagcccggaccttttgtttaatttcagtatacgccagatacggcaggtggtgctggatgatgagcggtattcggtcatacgccccaggaccaacatgagcgagatactggacgatctggggtatggggccaatgatctgttaaatgtaagtttcgtgttcattgtggaggggaagcaggataagagccgcctgcctcttctcctggaaaagtattattccgagatttacgatgaggcggggaatctgtaccgcatatccatcattaccaccaacagctgcaccaacatcaagacatatgccaacttaaagtatatgaaccaggtctatcttcgggaccaattcctgatgatacgcgatggggacggcaaggatccggaggaactggcgtcacagctgtgcaggtattacgatgagcggaatctggaggatgtggaccgcctgcctaaggtgacaaagcggaatgtactgattttaaagtattattcttttgaaaactatttctttaacccggcggttatggtccgcctgggaatcgtggaaagcgaggatgccttctaccaaacgctctacggcaaatggagggaatatctgtaccggattcgcagcggacagcagctgacggaagtcctgggacgggatttctcatccccggaagatatgaaggagcacatggaagaggtgcgcacctatctcaggggccataatctgtatgacatattttacggcccattcagggaaagggaaaaagagattctgaaggcatacattgacctggcgcccaaagaggattttaaagatattctagatgccattgaccggttcgtgtattttgacagcaggaaaagacctgggaattaaaggctggcagaacgggagatcggcgcggggggaccgcacaaaaggatatgacagaaaagggcgctgcccatggccggtcaggactggctgtggacagcgcctttttatatgaagcatgatttgacggttgggttaaaccgcataaggttcttcaactgcaggacggtctgcgttctttcccttgcccatcacgcaggtgaacacaaaggttcccagacataccgcggcaaatatgatgccgatcggataggcgatggcggtggagagctggaagccttcctttgccatgagaatataagtgcaggatacagccgacatgaaggtggccggaagggcggtgagccagtagatgcgttttctgcggaacagatatacgcttgcggcccacagggcaatcatagccagcgtctggttgctccaggagaaatatctccataccacctgcacatccacctgggtcaggacagcgcccacagccagcagcggaatggttaagatgagacggttcttgataagtttctggtcaatcttgaaccagtccgccagggtcagccttgcgctgcggtaagcggtatccgctgaggaaatggggcaggcaataacaccaatcatggcgatgacagcacccaccggtcccagaagcttgaagcagatttcatacacaacgctggactgtccattgcccagagcctccaacagacctcctgtgccgttgtagaacgctacgcctgcggcagcccagataagggcgatgacgccttctgccaccatggctccgtagaacaccttgcggccgtctttttcattggtaagacaccgtgccatcagaggagactgggttgcatggaagccggagatggcgccgcaggcaacggagatgaacatggtgggccatataggggtgcctgaaggatgcaggttggacagtgtaatttcaggaatgtgataaccgcccaggatgatggctcctcccacgcccagggccatgacgatgaggcagataccgaatatgggataaatcttgccgatgaccttgtcgatgggaacaaaggttgcgatgaaataataaatcaataccactgccagccagaatttggcatccaatacattaggagtcagcatggcaagcaggttggccggtcctgtggagaagcttacgcctaccagcaccagaaggaccacggagaatacacgcatgacctgtttcatggcattgcccagatatgtacctgtaagctcggacacgctggcgcccttgtggcgcatggacatcatgcccaccatgtagtcatggacgcctccgcctaataaggtaccgaaggtaatccacaggaatacgctggggccccagcaggcaccggccaatgctccgaagatggggcccagaccggcaatgttcagcagctgaatcaggaatatacggggcgtgcccatcggcacatagtcgcttccgtctgtcatggacagtgccgggggttttctgtcatcagggccaaatactttctcggcaaccttactgtagagcatgaatccgataatcaaaattgccagacatacaaaaaaactaatcatatacctacctcctatgtatttcttgtatttgtggtaattatacaatattaggagcataagtaaatattttttgtgtcaactgtatgaaggaatgaacaaacagtaaaaaaaggttcataaacggaaggcattatgctcagagacacatgtgatgggactaaaacccgataatctggcgcagcatttttgatttttccctgcttacaggaaggatgtttttctcaaacccctgcattttcacggccaggctgttgttggcccaggggaacagttcggtgatgaagttgagatttaccaggtagcttttgtgtatgcggcagaatccatgggaggccaggcgcttttcatactcccccaaaagaaggttttccgtgtaatcacgcgtggtggtatggatgatgcagctccttcctgaagtttctatgtaaacgatctgctgtatatccaccagaataatggtccggttcatattaatggccatacggctggacggaaaggcggctgtcacggattctcccgcctcctgcgggaaggcgggagaagacggtctgtacggctcgccgcagggctggtgatcgtcacaggatgggactgtagcagcggtaagagcctggtttttttgcaggtccttttggcatttttccaacactcggcgcacacggtccgggtcaaatggtttcagtatgtagttgttcacacccagctcaaaggccttgactccatactgggagtaggcggtggcaaacacaatctgggcgtccggcaggatgcgcctggcggcagctgccagggtggtgccttccatatcccccaggctgatatccacaaacagcaggtcaaaggtccggcggctgatgagttcaatggcagaagcgccgctgtcagcctcctcaatctggctgtccggcatggcctccataatctgatggacaagttcctttctggcaggacgttcgtcgtcaatcacagctatcttcattgttagattcctccagtttgatttcattagatggtacaggaatttcctccggttccagaggaattctgaaccggactctggaaccggcttctgaagcttcgattttcagaccgttatcttccccatatatgcttttcaggcgtttgtgtacattggacaggcccacgccctttccctggcctgtgtaaagactcaggaccacttctttggggattccctgcccgcggtcagccaccgcgatttccgccatgccatccacgctgtgggcgctgatggagacatggcgggcgccggtcctgtccccgccgtggcggactgcattttccaccaggggctggagaataaaggaaggaactttgcagttgaggtcgtcctccacatccagctccacaaccagtttttcctcaaaacgcgcctgctccagttccaggtaactggccacatggtacagctctgtgtggagactcagcatgtactggtcattttccagggcctggcggtagtaggaggagagggttagaatcagttccctggcccggtccggattctcccggcatacgcacgaaatggtgttcagcgcattgtaaaggaagtggggattcacctgggactgaagagccctgaactccgctttgcggcgaagctgcttctgataatccaggtcagacagctccagctgggtggaaaaaaggcgggccagctccgaggcaaagtccaggttggactgggaggtatgccagtgtttctttaccatcatggtcagactccccactggtttgtccatctcgatgagaggggcggcgacaatgatgtggttcttcagaatatggtacaggggatctgtcttttccgcataggaaaaggtggtgggctttctgtcgtggatggagcttagaatgggtgtcaatacggcttcatcccggaggacatcgtaccagttttcacccttcatggccaggattttctgggcgtccgtgaacatcacggccgcacaggaggtggactggtagatgatgtctgcggtggcctccatgtccgttttgctgtacagtccctttctcaggtgaggcaggctctggtccactattcccatggccaggcgcatcttctccgcgaactggctgtcctcctccatgaataccctgttaaaggtgccgagaaatacaaccatgcccagggcattcatgattatcatgggaaaggcaataaggcataccaggtccagggcagccggaaaggggcgggagatgagaaggataatagccatctgtccaatctcagccagagccgtaataaggaacactcctgcgccgtcaatcttgccggctttaaaccgtttggagaaggcggagccgatcaggccctccacaaaggtggagacagcgcagctcacggcagtaaagcctccgatatcaaagagataccggtgaagtcctcctatgacggcggctccgattcccacatagggaccgcctaaaagaccggctgccagcacgccgataaccctggtgttcacgatggcgccctgggcacggaccccggtgtaggtggagaaaatgctgaccagtccgaagatgaccgccagggcggccctgcttcccatggcatggctgtcctccagcagcatggaacgcaccatgggaagcttggtgagcatggtggctatgagcaccagaagaccaatatttaaaagcaggttaaaaaacatggtattggacatgatgacctccttgagtcgttctcacatcagtataccaaaaaattaatcttaagaaaatctttaattgtaaatcatggaagactatggtaatctaatggggaagataactgtattaatatacttaatacagatagaacgccgggaggctcaggatatacctggcccatgagccggcaaaagcactgctaaggctgctgccaggtatcctggcagcgagaacggagagggggaaggacgggatgattgtactggattacagggacagcaggccgctgtatgagcaggtggcggagcggcttagggagctgatgtttaagggcgccctgccgcaggacgcgcagcttccgtctgtgcgcagccttgccacggagctgtccatcaatcccaataccatccagagggcgtatacggagctggaacgccagggatatatttattccatcaaaggcaagggcagctttgttgcggataacagccggatgaaggctggaattctgcaggaatggaagggactttttaaatccgctgtggaggaaggcataaaggtaggcgccacagcgggagagatgaaggaaatgattgatgcggcctgccggaatcatgtcattgaaaggggagagagtaatgattgaagcagtgaacctgacaaagcggtttgacgatatcgtggcagtggaccacataagtgccgccatacgggacggcagcgtgttcgggctcatcggtaccaacggagccggaaagtccacttttttaaggctggccagcggcgtgctgaagcctgacgagggatgcataaccattgacgggcatgaggtatttgagaatatcccggcaaagaagcgctttttctatatatcggatgaacagtacttctttaataataccactcccgaggagatgatgcattattacaggaaggtgtaccagggatttgacgaggcgcgtttccacaagctgatggaaaatttcggccttgacgagaagcggaagatacacacattttccaagggcatgaagaaacaggtctccgttatctgcggcgtgtgcgcaggcacggactacctgttctgcgacgagacctttgacgggctggacccggtgatgcgccaggcggtaaagagcatatttgcggcggatatggaggacaggaacctgactccaatcattgcttcccataacctgagggagctggaggacatatgcgaccatgtgggactgcttcacaagggcggtatcctcctgtcaaaggatttggatgacatgaagctcaacatccacaaaatacagtgtgtccttaaaccggatatgaagccggaggacctgacgtcccttgacaaggtaaatgtggaacagaggggaagtctctgcaccattacggcgcggggaagcaggggcgaggtggaggctgtcatggcttcctatgagccggtattctttgagtgtatccccctgtccctggaggaaatattcatcagtgaaacggaggtggctggttatgacatcaggaagcttatactttaagctgctaaaggaggatttcaggagaaggctgtgggctgttgccctggtttttctggcatttttcttcacccttcccattgggctggctctgaacatggagaacgcagccaactccaattactacaggtacaatgattacgagccctttatccaggatggtaccatgaccgacctccagtacaaggccaggcttctggaactgaagacagaggttgtgttaaacggtgtggaatacgggaacggcatgattgcatttttgatgataaccgcggcagtggttatcggcgtatccagctttgcttatctgcacaataagaaaaaggtggatttttaccacagcataccggtgaggcgggaggccctgtttggagctcagttctccggaggcatatttatggttggcgctgcctatgggtttaatctgcttcttctcacaggggtggctctgtcctacggcgtgcctgcgggaaggatactgggagccatggccgggggatgggcccttaacatgctgtattacgccctcatgtattcagtggctgtggcggccatgatgatgactggaaatatcgtggtaggcgttttgggaacgggcgtgttctttttcttcctgcccggagtcatgatgcttctgggatggtactgtgaaacatttttcgtcaccacggccagatatatgtggagttcagaccaatcgccctttacatggggcgtcaggtacctgtccccgttcagcgtatatattaattcctttggatggaagatgaatgaactggtcaaacatgttccggagctcatctgcacgatcctggcatttctggccgtcgccacactggatctggagctgtaccgcaaacgtccttcggaggcagcgggcaaggctatggcatttaagaaatccatgccgcctgtccggatattgctggtgcttggaatcggtttagccggaggcatgttcttctggtcgctgcagagcaggctgcgctggggactgttcggaaccatggtgtcggtggtgctgacccactgtatcgtggaaatcatctatcattttgattttaagaagatgttctgccacagactgcagctgggactgtgccttgcagccgggatcctggcattcttaagcttccggtatgactggtacggttatgactcctatattccgtccaaggaagaaatcgtgtccgccagcctggatatcggcgtggacagcagctggctctcggataagacatttgagacaggcagtgacggaaagctgcagagaagatatgcagacccctatgaatatatagaagaaaacatggtgctaaccgataaagaggctgtcatgtccatggtggaagagggaaggaaacgcgcccttgagggacgggatgagcggctgggcatacgcaaggcagtggcccgtattgacggctaccattccaatgcagccagatctatcggcggggcggacggtcccacctccatctttctggccatgaagacgggcagcaaagaggattcggaacaggaaaaatttgagaccaatatgacagtatgctaccgtctggcaaacggccgtgaggtgaggcgttcctattccctgcccctgtctgccgtgatggattcctatgaggccctgtacagacaggatgcttacaaggaaggcatgtacaggattttaagccaggaaccaggacaggtaaaacaggttctgtacagggaggcggaccaggtcatggatgtgagtcaggacagccgtgtccaggaggccgtacttaaggcgtaccagcaggatatgagggagctgaccgtggaggaacggctggtggagatgcctgtgggcagtcttgtgtttatgactgaccaggagaatacctatctccagcagcagcgccagacaaccaggtccgcctttggcggcatggagcgctatcaggtggaggatgtgagccagtactggccggtgtacctatcctttgagcgtaccattgagcttctgaaggagcaggggattgaacccggcacctgtctggcgcctgagaaagtggagcgcatcacatttgacgttcagaattatttttatgaacagcagggagaactgccggaaggagaggcgctggcagagcttcagaaaatcaatcccaactaccgggagagcggttccctggtaattgaggagcccgctgccatccgtctgctgatgggagccattgcggaggatgacagctgccgtatgaattatctttgcgagacagtggagggaggcccctattgtaccataaggacagagaatgaagcgggagtgggaggaatgctcataaagaacagaatcactcctgagatagcggaactctttgccggcattcctttgaataacggaaagtagacggataggagaggactgaacataaaagcagggaatcaatcacgtttcagtgatttgttccctgcttttgttgctgccgtctatctgacattgtttgatatcgttgaaacacatctgcttcaggaggaacatcccccgcatccgctgcacccgctatgggcttcccgggcagtcccgaaaacatgttcatgaagacgccttcccgtaggggtagcggccaggccgctctcggctgtctcctttaaggtggaggacatggcgtcgcccaccttcttcatggtccagatgacttcgtcggcagggattgcgctttcaatgccggccagggccagctccgccgccacaaaggcgccggccacgccggaggcgttgcgcttgatacagggaatctccaccagtccggctaccggatcgcatacaagtcccagtatgtttttgatggcaatggcgatggcatgttccgccatcttcggggtaccgcctgccagttccacgatggcagcggcagccatggcggcggcagaaccgcactcggcctgacatccgccctgggcgcctgccagggaggcattgttggcaatgaccatgcctacggcggatgcggtgaacagggacatgacacagtccctttccggaatctgcttttcttcctgcatggtcagcagggcggcgggaaggatgccgcagcttcctgctgtgggggctgccacaatccgtcccatggccgcattgagctccgagacagccagggcccggtacagggcgccggagagaaaggaaccggtcaggctttttccactttcagatatttggcgcatcttaaaggcgctgccgccggtcagtccgctggtgcttttgaggtctttattacagccgggctcaatgcactctgccatgacctggtaatttttccgcatgtgttcatatatagattcctcagtctgttccatctgttctgcctgctgccttaagacgatggcagagatgggaaggccgcttttttcggcggcggttacgatggatgccactgaggagtaattgaattcaggttccataaatataaatcctcctgtaattgtaggtttcatcagctatatgggctgaagcatggtgctggagaaaatgttgggaagcactttgattttttcgttcagctccggtccgaaactgccgtcaatctcaatggtcatcacggcctcgccgccccggctctgcctggacagacggaagttgcagatattcacccctgcgtcggccatgacctccgtgacagccgcaatggtgccgggcgcgtcgcggtggagcacaatcagggtggtgtgctgtcctgtgatggatacctccatgccgttgacttcctttacaagtatatttccgccgccgatgctgcttcccaaaagggagaccgtgctgcccgcagcgtcggtcagggtgactctggccgtattgggatgggccccgtcgatgtcgcctgtggcaatgtttacttccaacccctgctctcttgccagctccggcgccctgcgtatacggctgtcgtccgtggccattcccatgataccggcaatgagggccttgtccgtgccgtggcccttataggtctttgcgaaagagccgtggaggaaaatgtccgcctttacggccggcgctcccagcagagccagggttatcctgccgattctggcagcccctgccgtgtgggaactggaagggccaatcatcaccggccccaggatatcaaatacattcatgatgttccgcctttctgttaatcttttgtctatattatttgtcaggcaatgatggtaataccgggattttcagccggcatcaaggcgttccggaatccgcagggacagcgtcccccgtgtttgccggcatatgttttaactctcccttctgatgcttttcttacatggttaatcatagcttattatatcccaaaatcccaaaatggaaaagtaaaaaatgcaataaatacccagttaatcccaataacgccttggtgcgccatgggactcaccaacacccaaatcggcggctccctgctttgacggctggctgttgtttgtgcttcttggtgtgggtcatccgggatgcagtcctgggatttctcaccatacctattacagccaaatccccctattgacaatcctcccccataaagctacaatcatatcaacagatggaccatccagtttatgtaaaacaaagtaaggtctgccatcagggagaaagagaggacataagtatgatatcggagaaaatgaaaccattggtcaataataattccgccatccgggccatgtttgaggagggtaagcgtctggcttccatccacggtgcggagaatgtgtatgatttcagtctgggcaatcccaatgtgccggctccggcggaggtgaacctggcaatctgtgatatcctgaaggaagaagagtccacctttgtccatggttatatgagcaacgcgggctatgaggatgtaagacaggctgtggctgaatcattaaataagcgcttcggcacgcggtttcacaagaacaatatcctgatgaccgtgggggcggccagcggcctgaatgtgattttaaagaccctgctgaatccgggggatgaggtcattgcatttgccccctattttgtggagtacggcaactatgtccgtaattacgatggaaacctggtggtcatttcaccggatacaacggattttgagcccaacctggcagagcttgagcagaagattaatgctaggaccaaggcggtcattatcaatacccccaataatcccaccggagtggtgtactccctggaaacccttacaaagatggctgacatcatgcgggccaaggaaaaggaactggggacaaccatcgtgctgctgtccgacgagccttacagggaactggcttacgacggcgtggaggtaccctatgtgacgaatgtttatgacaacaccgttatctgctactcctacagcaagtctctgtccctgccgggagagcgtattggctatctcgtgattcccgatgccttaaaggacagcggggaagtgttcgatgcggccaccatcgcgaaccgggtgctgggctgtgtcaatgccccgtccctgatgcagagagtcatcatgcgctgcctggatgccaaggtgaatctggaggcgtatgacaggaacaggaacctgctctacaacgggcttaagggtctgggatttgagtgtattaagccccagggcgcattttatcttttcgtaaagtctccggaggccgatgaaaagaaattctgtgagaattgtaagaaatacaatatcctggtggttcccggaacctccttcgcttgccccggctatgtgcggatatcctactgtgtgtcctatgagcagatcgaacgctcccttcctgccttcgcaaaggcggccgcggactacggcctcaaaaaataaacagccggagagcgggaaaattctggaggagagcagatatgagaccatgggaaatgaatatacgccgggtagttccctatgtaccgggggaccagccggcaggcgataaactgattaaactgaataccaacgaaaacccctatccgcctgcgccgggcgtggaaagggctctgaaggaaatggacgtggaccggctgcgcaagtaccctgatccgtcatccgcagagcttgtaaaggccttggcggaatactacggggtgggggaggaccaggtgtttgtgggggttggatctgacgatgtcatagccatgtccttcctgaccttttttaactcccaaaagccggtgctgtttccggatatcacctattccttttacaaggtttgggcggatttataccggatttcctatgagacgccggcgctggacgaaaatatggctatccgtcccctggattataaaggggaaaatgggggaatcatatttccaaaccctaatgcgcccacaggcgtctatatgcctctggaccaggtagaggaaattgtaaaagccaaccaggatgttattgtaatcgtggatgaggcatacatcgactttgcaggcccctctgccagggagcttttgtccgggtatgacaacctgctggtagtccagaccttcagcaagtcacgttccatggcaggggtgcgtattggctttgcactgggaagccctgtattgattaaagcgctgaatgatgttaaatattcctataactcctataccatgaacctgccgtcccagctcgcgggtacccaggctgtaaaggacagggcatattttgaggagatcagggcgaaaatcatggataccagggagcgcgccaagaaacggtttgcagaacttggatttacattcccggattccatgacaaattttattctggccacccatgaacgggttccggccagggccatattcgacgcgctgaagaaggagcggatttatgtgcgctatttcaatgcgcccaggctggacaacagccttcgggtcagcattggaacggatgaggagatggatgttttgttccggttcctggaacagtatctgaaggagtggaagcctgccggggattcagagtaacggaaaaagcagtcaggagagatggatatgatggaagaaacaggctggaagcattatcttcgtcttatacttaatattataatcccgttgacgggctggctgttaatctgcctgctgggacctaagcttttgaggtttttcatgccctttgtcataggctgggttatcgccatgatagccaatcccctggtgcgttttctggagcgccgggtgaagctggtgcgaaggcacagctccattgtcattgtggcggctgccctggctcttgtcatcggactcttatacctgctggtgtcaaggacctttgtcctgctgcgccagttcattctggaccttcccggactttatgccggtattgagggggatgtggcacgcagcatggagcagctggagcatctgtttgatttcatgcccgacagcatacagcagagctgggcccagtttggaaacaatctgggaagctatatggggacggttgtggaaaagattgcctcccctaccgtggaggcggcgggaaccgtggcaaaaagccttccggccatgctggtctacaccgtggtcaccatcctgtctgcctatttctttatcgtggacagggaccgcatcctggcagccataaaagcccatatgccccaatgggcaggccattacggactgtacctgaagggggaggtgcgccatcttataggcggttatttcatggcccagtttaagattatggcagtggtatggctgatacttacggcggggtttataatgctgggagttggttacggcccgctgtgggcgtttctcatcgcgttcctggattttctgccggtattcggaacaggtacagcccttcttccatgggggcttattaagcttttgggaggcgaatacgcctttgccgcgggcctgctgctgatttatgtattgacacaggtgacaaggcagattgtgcagccaaagctggtgggtgacagtatgggtctgcctccccttctcacgctgtttttattgtatctgggatttaagacggacggaatcgcgggaatgattctggccgtgcccatcggcctgctgtttgtgaatctgtatcattacggagcctttaaaggcattacggacagtcttgctgtccttgcgggggacatagagcggttccgccgtaaagaggtatgaggttccggctattgaggtaaaaggaaataaaatctaatcaggagaagacggagttgaaagtggagaataatctggatacagataaagtcagagggctggtgtggaggctggcatttccttccatgctggctcaatttgtgaatgtgatgtacagcatcgtggaccgtatgtacatcggaaatattccggaaatcggcgccctggccctggccggcgtgggaatatgcggccccgtggtcaccctgatatcatcgtttgccagttggattggagtgggaggagcgcctctcatgagtatccgtctgggacagaaaaatgagagggctgccgcccagatggtggccaactgcttcgcccttctgacaggtatggcccttattattatgacggtgtcctatctgtttaaggatcagcttctggtattcttcggtgcgggaccggctatatttccctatgccaaccagtacatgagctggtatctgacaggcactgcatttgctttgctctcagcaggcatgaaccagttcatcatatgccagggatttgccacggtgggcatgaagtcagtggtgctgggcgctgtgagcaacatcgtgctggacccggtgttcatctttggcatgaacatgggggtcaggggagctgccattgcaaccgtgctgtcacagatggcctcctgtatctatgtgctgctgtttctgttcggaaagcgtcccctggtgcggattacttttggcgggtacaggtggaaaaccatgaagcaggtgcttttggtgggcttgtccccgtttttgatcattgcctcggacagcctgctcatcattatcatgaacatggttataagcagctatgggggaccagagagaagcggcatgctccttacctgcaataccattgtgcagagctttatgctgattattaccatgccgctgggaggaattaccggtggaacacagaccgtaatggggtataattatggtgcgggccgtgctgacaggatacggaaggcggaaaagcatgtactgcttttatcggttgcctttacaactgtcatgttcattattgcacaggcgggaccgggatattttgtcaggatatttacaagggaaatgtcctatgtccaggtgacggagtgggcaatccggatatttacattgtgtatcatccctctggctgtggaatatacggtggtagacggatttacaggtatgggaatcgcaaaggtggccatcagcctgtccatgttcaggaagtcggtctatttcctgggaatgattttgctgccacgttattttggggtggaggctgtgttttattctgagcccatatcggatattacggcctgcgcagccgcgtccacaacgtttatcctgttaagcggaaaggtgctgaaggataaccgcaggctgttttgattgggcagtttgcggcagtcagccgaaaacatacataaaaggaaggaagaggaatatgaatatactggtaagcgcctgtttgctgggggtggaatgcagatataacggccgcggcgtgctcattccccaggcagaggaacttttaagcagacatcacctgattccggtatgtcctgaaatcctgggcggcctggccacgcccaggataccggcggaacgggtggggacaggagtcattacaagggatggcggggatgtcacggcagcatatgaaaaaggcgccggggaagtgcttaagctggcacagctgtacggctgccaggcagctatactaaaggagaggagcccttcctgcggaagcgggcaggtctatgacggcacatttaccggcacccttactgagggggacggtgtctgcgccgcatgtctgaaggaacatgggattagagtatatggggagagtcaggtggggagactgttggaagacatagaaaggtaaaggtgcatgagggaagaaaaaaataaggcagaatctgtacctgcccgcagcgaggcaaggcgtccccgccgaagccgaagcagggaggctttcaaacagcgccagaaggagctggcagatagcagggcgcaggagcgcagggtacatgagaataggatacaggaaaccggaggggcaggcgaaaacagaacgggtgacggacatccgcaaaatgacggtcagggaaccttggatacacagggaaaaggtccttttgataaaatcctgagctggaaggcagctgccctgattctgattctggccggtattgtactggttggagtctatgtgtacaaagcccagggttacaggaatacatattttccccatacagttattaacgggacggacgtgtcagggaagaccgcggaggaagtgaaggaactcatagcctccggagtaaacggttacggtcttgtacttaagctgcgtgaagagaaacaggagacggtcaccggtgagaaaatcggccttcacactgtgtttgacggaagtctggaggaaatcatacgccagcagagtcctttccgctggcccagatacctgcttaagggcccatcctacgatataaagaccatgattgcctatgatgatgacgctctggcacagacacttaatggcctgtcctgttttgacagcggcaaggccgttctgccctcggacgcttacctgtcagactatgtgagcggccagggatattccattgtgccggagacagaaggaaccacacttgatatggataaggtcagggcccaggtagagcaggccatatccagtcttgccccggaattagacctggacgcgctgggctgctacaaggctccgtccatccgcagcgacaatacctctctggcagcggccagggatgccaggaaccgctatgtgaacatgactgtgacctacaccttcggcagtaagacagaggtactggacggggatgagatacatgagtggcttgtgtctgacggggaacaggtttccattgacccggaccgggccgcagcctatgtaaagagcctggcttccaggcataacacggcatacaagaggcggtcctttgccaccagctacgggcagaatgtggaggtatccggtttttacggctggaggatcaaccagtccgaggagaccaaagaactattggggattctggaggcaggagagagcgttaccagggaacctgtgtatttgcagacagccgcgagccatgacgggccggattacggcagtacgtatgcggaggtaaacctgacagcccagcacctgattttttacaaagacgggcaaaaggtgctggagtctgactttgtctccggcaatgtttccaggggccataccacgcctccggggattttctccattacatacaagcagagggacgcggtgctgaagggggagggatatgccagcccggtgaagttctggatgccctttaacggaggcattggtttccacgacgccagctggcggtccagcttcggcggctccatctataagagcggcgggtcccacggctgcgtgaacatgccctatgacaaggccaaagagctttttgaaaatgtatatacgggcatgcctgttatctgttatgaccttccgggaacagagagtaagaaatccagccagtcctccggcagggcgccccaggagacaacggcgcctgcacagacggcgcctgcgcccacacaggcacctccggcgaatccgcccgttccgccggagtcactgccgccggagacattgccctcagaggcggtaccacctgaaacatcaccgcagccatcacagcctcaggttattatacagcctgcggatcagacaacggcagcacccgcccagacacagccgtcgtccggaaccacagaagggtacggcccggcctttcagaccccacagtccggctcatcagccggaccgggcgtcagctgacaaaacttgccgtgtaagggccaaaccataaggatttttgcaggaggcagtcgatttttcaagtgaatttattgacaaatggaaaaaaccattttataatgcccttaatgcatctggggattactcgtaaagccattattcaaaattagggaggatatggactatggtagaaaagaaagatgttaaggcaactgtaaaggcagcagcacaggcagcacagccggcagaggccaaggcagaagcaaaaccagcagttccggagaaagtagaagcaaaggcagaggcagcagttccggtgaaggcagaagcagctcctgttgagaaggaagcaaaggcagctccggctaaaaagacgacagccaggaaaacagcttctaagacaacagccaagaaggcagcggctccaaaggagacagtgaagaaggaggcggctccaaaggcggaagctaagaaggagacagcccccaaagcagcagctaagaaagagaccgtgaagaaggcacctgccagaaaggcagcagagccaaaggcagccgtacatttccagtttgacggcaaggaccttgtggcaaaggatgtgctggaccaggctgtgaaggcattcaagaaagcacacaggggcgttgagataaagaccattgatctgtatattgtggcaaacgaaggcgcagcctactatgtggtgaacggcgaaggcggagatgattacaagataatactgtaatccggtataaaggattgaaggatgaagtgggttgctgtatcatggatgcagcagctcatttattttatgtgccgcgggcaggcagaatatcaataaggatgggaaacaggacagtatgacagatttaccggtacgatttgaagagcggatgagagcattattgggagaagaatatccggcctttgcggccagctatgacaaggaaagggtccagggattgaggtttaacagtctcaagttcccggatggaaggggggacgcagccggaagcggaaaagacgggaaagacaaagggacctgggaagagaccggcgccgcagaagcagcggaacgggtcaggcaggaaaccggatttacccttgagcggattccgtgggtgaaggaaggatattattattccggggataacaggcccggaaagcatccatatcatgaggcgggactttactatatccaggagcccagcgccatggccgtggtggaattattgaaccccgggccgggagagcgtgtgctggatttgtgcgctgcgccgggaggaaagtccagccacatcgcttccaggatgaagggaaccggctttcttctgtccaatgagattcatccggccagggccaggatactttcccagaatatggagcggatgggtgtgcgaaacgcagtggtgtccaatgaagacgcccaaagcctgtccgggacattcgaccgttttttccacaaaatcgtggtggatgccccctgttcaggtgaaggaatgttccgcaaggatgaggaagccagaagccagtggagtgaggaacatgtgaagatgtgcgccgcccgtcagggcgagatactggaccacgcagccgccatgctggcacccgggggcagaatggtatattccacctgtacctttgccccggaggagaatgagggtacggttctggcctttctgagacgccatcctgaattctgcgtgaaacaggtgcctgcctatcctggctttacgaaaggaaagcctcagtgggcagggccggaggcggaaggctggggcctggagaggacccttcgcatcatgccccacatcctggagggagagggtcatttcatggctgtcttgagaaaggagggggatccggaaaatgcggcaaagacagaaagccgggacaggctgtatctggacagcagaaagagaaaagaagcgttcagggattatgaaccctttatccgggacactctgacagaaccggacaccttcctggagaggaaggaatatgttctgttcggggaacagttgtatctgatgccggccgatatgccggacatgaagggacttaagatactccggccggggcttcatatgggcacccttaaaaagaaccgttttgagccctcccatgccctggccctggcgctcaggaaagaggaggcgcaatgctcctgggaactgtccccctccggagacagcgtaatccggtacctgaaaggtgaagctctcagcgaggaggcgggaatatttaagggacgcctgaaaggctgggtgttagtctgcaccggcggtttcagcctgggctgggccaagtatgcgggaggcatgctcaaaaaccattatcccaaggggctgcggcggaattaaaatccgtcaggtgcctggcggcaggagccgttccatatcttcgggcagcccggctgtgaattccatctccttccctgaaataggatgttcaaacctgaggagataagagtggaggggctgacggccgatataccggtaatccgggcagtataggaagtctccgggaaggggatgccctatggacctcatgtggacccgtatctgatgcgtcctgcctgtttccaggctgagacttaccagagacaggtcctttttttcattgtagagcagggtacggtaatgggtgaccgccctttcgcctgcctccgggtccacccggcgctcaatggtggagccctctgccctggcaatggggctgtcaaccgtgccttcctccggtgtatgcccaagtacaatggctctgtactcccgcctgattctgcgtccggccatttgttccgataagatacaggcgctgagcatatgtctggccaggataagcagcccggtggtatccctgtccagccggttgatgacccggtaagtaaaagcctcccccttttcacggaaataccaggagacagcattggccagggtattgtcatagtgaccctgggaagggtggatgggcacgccagcatctttattgattaccagtatatcctcgtcctcatacacaatggaaagaggaagctttaccggcacgatattcccggaatcctcctcctcaggcagcgccacctccactgtctccccggccttaagccggtaacctgcgtgcgccggcattccgtccaccgcaagtccccggccggccttaatgcgcgccgccagcctgtgggaaaatccctttgcctttaaaaactgtccaaggacaattccatcctccctgtctctaatggtatagcatagctctctccgtctcatgtccgtccctcaactctgttttctgtatagaatcccgtcaactgcccggaaaatttgttaattcaaatgttttttcttgctggcagcgtggtccacgatggcgtcctttcgcaggaagctggcccgttttacgctgtctattccatatttgctgcgtatggcatccactgccttttcaaaatcctttttcttctgaagtccggggtcgtcaaaaaggctcatctgtgagaagccgtcatcggaaatcttaccggcccgcacacccatgagccgcagcggcgtcatgtgccaggattccttcagcagacggcaggaatattcataaatcacggaggtggaatccgttggttccggtatgaccatctggtgcgactgattcttaaactcccagtcacgcagctccacacagacattattgcacagcacatggtccgccctcagcctggcgcctacggtttcacagagggagagcaggacctggcaggcgctttcatagtcagatatatccctggaaagggtgatgctgttgccatacgccttattgacaggttccttttcagccacaggatcatcatcaatgccattggcgtactgtcggatgaggacagcatatttctcgcccaggtgggacttaagcacccccaggttgcagcatgccagctgtccgatggtatgcagccccaggttttccattttcctctgtgcagcacctcccacaaaaaataactcccgtataggcaggggccacatcttatcagccacctcccggggaaacagggtatggcatttatccggtttctcaaagtcagaggccatcttagccagaagcttattggtggagattccgatattcaccgtaaatcccagatccttcctgatccgttcccgaatctcattggctacctccagggggctgccaaagagatggatggtgctggtcatgtccagaaaaatctcatcgatactgaatttttcatggtccggcgtgtattcctccaaaagctccatcatgcgccgggagcatttaatgtaaaaatcaaatcgggacgggacaaccaccagatccgggcatttgcgcatggcctgaaccaggggctccccggtggtgaccccatacctcttagccaaaggagacttagccagcacgattccatggcgggacttggcgtcccctccgaccgcagcagcaaccgttctcaaatccagggcctccgggtcctgagaaagccggtacacacattcccagcttaaaaatgctgaattcacatcaatatgaaaaataagacgatccccctgtcccatcataaaacaccggcctttctgtcgtattgtccgcttacagatatcatagcagaatatgtgttcgggggcaagagggagatgggaagatgggggagaggggacgcggatggcttgggggatcggcgtccgtgggaggaagggaggaggcaggtggggatacggctgcctcctcccttcctcccacggacagaagcatctccctcctcgcgccccccaacccacattcccagtaataatcattttcacccgggaatactattaaaataaagccaactaggcggcgtcgcttatgaagcaatggatttttttgataacactgacaatttcactggcctgcactcagataaatgcggctgcagacagttggacttcggtacctgtgacggaagaggcccggggggaaggggatttcctgaagctgtatgcccagtctgctgtccttatggatggggataccggcagaattttgtatgggaagggacaggatattatccggcccatggccagtaccacgaaaattatgacctgtatcctggctctggagaacggaaggggggaggatacggtgaaggcgtcctccaatgccgcctcccagcccaaggtgcacctgggggtacgggagggagaggagtacaggctggaggaccttttgtatgccctgatgctggaatcctataatgatgcggctgtgatgatagcggagcacataggaggcagcgtggaagggtttgccgcaatgatgaatgagaaggctgtggggcttggctgcggggatacctattttattacgcccaacgggctggatggggtaaggacagatgaacagggaaaggaacatatccattccaccacagcctctgatttggcccgaatcatgcggtattgtgtgacaaagtcccctgccagggatgaatttttaaagataacgcagacccagaaccactattttacggatacggcagggaaacgctcttttaactgttataatcacaacgcgtttctgactatgatggaaggggtcctgtccgggaaaacgggatttacagggggagccgggtattcttatgtgggagccatggagaaccagggaaggacctacgtcattgcccttctgggctgcggctggccgcctcataagacatataaatggtcggatgcaagaaagctctactcctatgggctggagcattttaagatgaaggatgtgttccgggaggaagcctttgccagggttcccgtggcaggaggactgtgctggaaggaaggggaaggcgccactgaccaggtggagctgtccatgatgcttaagcccgatgatatgcatctgacactgctgatgggagagggggagcaggcgcgggtggtgaagaaggttccttctatattaatggccccggtcagagagggacagcaggtgggaaccgtggattattacctgggagaggtgctggtaaaaaggttccctgtctatgccgtgcagggagtggagaagatgaatctgagacgggccgcggaccgggtgctggatttgtttctggtgagataggaagggggacaggggacttttaccagggcatgggaaggggattttaaggggctttggccgggatatgccaggatatgccacattatttaatcttttcttacaaatctttgtattatgtgaagtttccgccgttcttgttgacatatgaacgcttttgtcattataataggattaatgtcataaaatagaaattcatacgaattttggatatgaatgaagatacaggagatttatacataatgaagggaaaaaagttaaaaaggggcctggcgcttgtgctgggactgatgctggccgctgaggttccggcatctgtggctacgccttttaaaatgtttgattcctatgcatatacaggggcggccacggttaaggccacctctttgaatgtacgcagcggagccggcaccggatattcatcggtgggcaggctggcagcgggagcggccgttaccgttatcggggaacagcgcggaacagacggcaatacatggtatcagattcaatatacaggaacgggcggagccgttaacaccggctatgtctcatcgctctatatcaggcttccggtggcctataccacggattctaattttgaagcatatctcacctcacagggatttccggagagctataaaaacgggctcaggcagcttcatgcccaatatccgaattgggtattcaaagccaaaaacacaggtctggactggaacacggttattgaaaatgagtctgtgctggggcgcaaccttgtggccacgggcagtgtttcctcctggaaatccgttgccaacggagcttataactgggacaacagtacgtggaccggattcgacggcagcaactgggtggctgcctccgaggatatcatacggtattacatggaccccagaaattttctggatgagacgtatgtgttccagttcctcaaccatgaatatgatgccaatacacagacaaaggaggggttaaacagcctcataaacggctccttcctttcagggacaacgaattccacaggaacagggggaagtgatttctccagcgggccaggatcttcttcggaaggtcccggttcaggcggtcccggctcctcaggcagttcctcaggttcttccaaggggcccgggcgcagcagtacctatgaagatacacagcatggaccaggggtttccggcagttcaaacggctccgggtcagcagcggtctctccgggaggcagctcctcaggcggatcctcagggagcagcagtccttctggcagcggggaggtgagtctggagtccccacacgcatccattgagcccagagagcgcaatatagtgtctaccagcgtaagcctggtggctccgggacaggacggttccggcagcagcagtggtcccgtgtccccgggccagagtggcagcggcacttcaaacggtccggtggcgtcacccgcatcggaaaatgtggtggaccagaccggcacgtcgccgggaggcggctccaccggtgcagcggctccttatgcagacatcatcatggccgcggccagtcagtcaggggtaagcccttatgtgctggcagccatgatactccaggagcagggcaataatggtacaagccctcttatttccggttcctattccggttacgagggatactacaacttctttaatgtggaggcataccagtccggcgcagtgtccgccattgagatgggactcaggtttgcgtcccagtccggttcctacggacgtccctggaacacggtggagaaggccatccggggcggcgcccagaattatggggataattatgtgaaagccgggcagaatacattttatctgaagaaattcaatgtccaggggtcaaacctttataagcaccagtatatgagcaatatccagggagctgcctcagaggcggccaagctgtcccaggcatacacgtctgatttgaagaagacagccctggagtttcatatccctgtatttaacaatatgccggagcagccctgcgtggcgcctaccggagacggaagccccaacaacaagctgtccggtctcggagtggacggtttcaatctgactccaagctttaacagggatacccaggaatataatctgattgtggattcttctgtgtccaatattacagtcagcgcatatgcgtcggattccaatgcgcgtgtggacggcgcaggcaatgtctccctgcagaatggcggaaacgacatttccatcgctgtgactgcccagaacggaagcgtgaggacctataccatccatgtggtgaagcaggacggcggtcctacccagggaagcgcaggctcacctgtatatggaggcggcagttttggcggtacggtcagtccggacggcagttcaggcggcagcggcggaccaggcggttcaggcggaccgggaagtccttccggaagcggcagcggaccaggcggaagcaatgtaaccattgtagaagtgcagtcctgataaagggaaaatattataatcagaaagtgggaaatgatgatgattagacgtatgagacatgtggctgcagttctggcaatggcgtgcatgatgacagtcatgatgccggcgcagatgataacggcctttgcggcaaatgcgagaatcgccttttccgacccatccgcaaccgtgggcggcaagatcaaggtgaatatgaagataaccagcagcgacaacctggccaatgcggatgtgatgctgtcctatgattccaacatattggaatttgtggacggcaccaacgcggacggaggggcgggagctgtccgggtccatggggacgcaggcacgcccaatacgggaacccttgcattcacccttaatttcaatgccatagcggccgggaccagcaagattgaggttaccagccaggaaatttatgattccaactcacagattgtgacggttaaccagcagggaagctccactgtgacggtcagtgccctgcagtcagcttccaaggatgccactcttaaatcactccagatttcaccaggaagcctgacgccggcattttcaccggatgtggacacctacgcggtgaccgttggaacggatgtggataaggttattgtcagcgcggattgcacggacgggaacgccaccaaggtggtcagcggaaacgaaggactccagatgggcgaaaaccgcgtgacatgccgcgtgacagcccaggatggcgagaccatcaaggaatacgtcattgtggtgaccaaggcagagggcggcgccagcgctgcggatgccgatgcttcttcccaggtaaggatgcggatagccgagcgcgtcatcaccattcttccgcctgatcctgaggtgaaggttccggaaggattcaaggagagcaccattaatatcgacggccacaaggttcagggctgggtatggggctctgaggcagagcaccagtactgtgtcgtgtacggtatgaatgagtccggagagaagagcttctaccgttatgatatgaaggacgatgagaggaccatacagcgttactttgaggacccggccatcagcggttccgtgacaaaggaagtgtacgatgaactggcccttacatacgacaagatttacgatgattacaatctccttaagatactgctgattgtgaccattgtcatcgcaatcattctgctggtcatccttctggtggttgtatttaccaggggctccggaagaaagggcggcagccgggatgaactgggtgacaagaaggacggtccgcggggcggccggggcaggaacagcaggaaggaaaaggcagaggagcctgagcttttggagcattcagaggattatcaggaatacgccgatgaggagggctgccaggattctgactggtacgatgaatctgaggaatatgaggatgattctgcctacggcgatgatgagggctacagagaccttccggaggaggattatccgctggatgaagaggatgaggacatctacgaagaggatgaagatgtctatgaaacggaagaagagcctcaggtggagattccggtgaaaaagccggtgaagcctgggaggccggttcagacaccggaccgtgcgccggcccaggcgccggcatccaggcagaagccgcctgtgaaacaggaacggccggttgtcaggagggaaacagagcagggttctgcaaaacaggacgcacaggatgatgattttgagatttttgatttgtaataaagaataacagaacccacaggcagaccataaaggcagcagccatccgggatattcccatggctgctgccttttgcgtgctgccggagactgtacgcgtcctcaatggttacagttaattcttaatgataaaaatttattatcagaccatcacaacatataattatactttatttttaggggttgttataataataacataagccttttaatgaagaagtatatataagggataaaagaataaaggaggaggcatttcatgggatacagaatggatttgaaggatgccgacaggatgtttgcaaagcttcaggaagagtatgagatatgggcgccaaaacgttttgtgggtaagggcaggtattccgacacagacctgattaagtacgccagggtggaccgggcggaggaaatcgagtacagggaaaaatcggattttccggccaaggaggtattaagccccattacccagtccctgttctatttcacagaagatgaattcattgaaagcaaggctgtttccaagaagctgcttatattcatgcggccctgcgatatccacgcgcagcatcatcaggaaaagatatatctgaccaacggcggttatgaggatatatattacaagcgcatgaacgagaaggtcaagatagtgatgatggagtgcggcaaaggctgggatacctgcttctgtgtcagcatgggaaccaacaggaccgatgactattccatggcagtccgtttcggagaagacgtactggagttccaggtaaaggacgatgcatttgcctcctatttcgagggcatggaggaatgtccctttgagccgcagtttgtggaaaagaatgagctgaccctcacggtgccggagattccggataaggaggttctgacaaagcttaaggagcatcccatgtggaggcagtttgacggcagatgcatttcctgcggcgcctgtaccgtggcgtgcagcacctgcacctgttttacaacaacggatatcatatacaatgagaaccgcaacgtgggagagcgcaagaggacttccgcctcctgccaggtaaaggatttcaccgatatggccggcggcatgagcttcagaaacagggccggggataggatgcgctataaggtgctccacaaattccacgactacaaggccaggtttaaggactaccatatgtgtgtgggctgcggacggtgcatggaccggtgtcctgagtacatatccatcgtggctacagtgaataaaatggcagacgctgttgaggaaataaaagccggcaggcaggcataggagaggggacgcagtcatgaataatatagtgaagccagtggcatgtaagatacgcgaggtaaggcgggagagccttcatgaatatacattcagagtggagacggatatccgtccgtcccacggacagttcctgcagctttccattccaaaggtaggggaagcacccatatccgtcagctccttcggggacggctggatggattttaccatacgttccgtgggaaaggtgacggacgagatatttgagaagcagccgggcgacatccttttcttaaggggagcctacggcaaaggatggccggtggagcagtttcagggtaagcatatggtggtcatcaccggcggcaccgggctggcgcctgtaaagagcatgctgaatatgttctggaatcaggaggattttgtaaagagcgtgcacctgatcagcggatttaagaatgaggacgggattatttttaggaatgacctggagcgctggaaggagaagttcaccaccacctatgccctggatacggaccacaaggatggctgggagacaggttttgtcacagagtttgtgccggggattccctttaaggactttggggaggattacagcgttgtggtggtaggaccgccgcctatgatgaagtttacgggcctggaagtccttaaccagggcgtgccggaagaaaagatatggatgtcctttgagcgcaggatgtcatgtgccgtgggcaaatgcggacactgccgcattgatgaggtgtatgtctgtctggacggacctgtgtttaattatacccaggccaagtatctggttgattaagagaggggtggcgaaggaatgaatcatgatattgatataaaaaaggtaagaatcaactgtttcagacagtccaaggtggcgggggagttcatgctgcagatgcgtgtgccgggagccatgattgaggcaaaacacttaaagctggtgcaggatctctgtgagcgctttggcaacggcacctttcatctgggcaccaggcagacctttgacatacccggtgtaaagtatgagaatatagaggaagtaaataagtacatcaagtcatatatccatgacgtggacgtggagatgtgcggcgtggacatggatgtgacggattacggctaccccaccatcggcgccaggaatatcatgtcctgtatcggaaacgcccactgcatcaagggcaatgcgaatacatacgagctggccaggaagattgaacgcctggtgttcccgtcccattaccatatcaaggtggctgtggccggatgtcccaacgactgtgttaaggctaacttcaatgatttcggcatcatgggcatcaacaagcaggtatatgacattgatcgctgcattggctgcggttcctgcgtggacgcctgcaggcatcatgccacaggcgtgctgagcctgaaccggaacggcaagattgacaaggacacctgctgctgcgtgggctgcggcgaatgttccctgatttgtcccaccggagcatggaccaggggcgataagaagctgtaccgcgtaaccctgggaggacgtacgggcaagcagaatccaagagcaggcaagctgttccttaactgggttacggaggatgtgatcctgggcatgtttgccaactggcagaagttttccgcctgggctctggattacaagccggagtatctccacggcggccatctgattgaccgtgtgggctataaggaattcgtaaaacatatctttgaaggagtggagtttaatcctgaggcaaagatggcggatgatattttctgggctgagaatgagcagagaggaaacatgcatgtgatgccgctgtctgagcataagcacgcaggcccccaggagccggcaaaaaagcaggcatagaggaatttggattataaatagcggcaaaagaattcaaacagcggggatgtgaatgcataccctgctgtttttctgcggtttccgcgcaaagattgccggccctgtaatattttgggtccggacagggatactaaacaaggtaagtacggacagcgcggagaaagatgcggacagccggaaattattagtgtacactaatttatacagtgacattttgggaaaaatgtagtatacttctaagcgaaataaattgacggatttttaacatattatggacgaaaggaagaatgaatatgtactgtgtaaagcgcatcaatgatgatttgttctgggttggcggtacagaccggaggctggccttatttgagaacgcgtatcctattccgcggggggtttcctacaatgcttatcttctgctggatgagaagactgtgctgtttgacacggtggaccgggcaatcacggagcagttttttgagaacatagacgcactgttaaagggacgagccttagattacgtggtggtaaaccacatggagccggaccactgcgccacccttggagagattgtgctgcggtatccgggggtacaggttgtgtgcaaccccaaaaccattccgattatcaaacagttctataattttgacattgattccagagccattgtggtcaaggaaaatgatactctttgcacggggcggcatacatttaccttcctcatggcgcccatggtacactggccggaggttatggtaacctatgataccacggacaagaccctgttctccgcggatgcctttggcaccttcggggccatgaacggcaacctgtttgcggatgaggtgaattttgagagagactggctggacgatgccagacggtattataccaatatcgtgggcaagtacgggccttccgtgcagaccctgttaaagaaagcgtcaggcctggacatccgtaccctgtgcccgcttcacggcccggtatggcgcgaggatataagctggtacgtggacaagtatctgacctggagcagctatgagccggaggaaaaggccgtgatgattgcctatggttccatctacggcaacacggagaacgcagccaatatcctggcctgcaaactggcggagaggggaatcaggaacattgccatgtatgacgcctcctccacccatccttccactattatctcggaggcattccgctgcagccatctggtgtttgcgtcagccacctataacggaggcatcttcagcagcatggagcatgtgctcatggatctgaaggcccataacctgcagaacaggaccgtggccctgatggaaaacggctcctggggcgtgctgtcaggaaagcagatgaaggaaatcatcggctccatgaagaatatgaccattctggaacagatggtgacagtaaaatcatctcttaaggaatcccagatggaagaactggattccatggcggatgccattgcggaatccatgaaatagcagcactgaatcagtgacagtcatagttttaaacgatttgccggatggctttattggagctgtccggtattttattgcgttttttgtaccttttttgtactttttgtgtatttttggttgttaatattgcacttatttgtgaaatttagtagtatagaacatgcattccataatttaaagcgctgaaatatgggaggcgcagaaaaatacaaatgatgtgggaggatatgataacatggggattatgagactgattgaggggataagggcacggaagacagtcagtgtgttttccggaagtcatgaatatctgtttactgcagggaaatccggtcccgcctgtccggacggtttttgggaaatcggcgtcagatgcaggccggaggcgttttctgaccgaaccggtccggacaatggtccctttttatttttcgacagcagaactaaccagtttctggattttaccgggggccttctggaaacattatttcccatgtcctctgaacatttttacgatatggctgtcctggaacaggaagtgaatctgagggtgagccggtatattgctcataatctgataaataagatacaggagggtgcggcaaagtacgggcgggaggagtttgacgaaggggagatacgggagcaggcgtatgtatgttatatgacaggggcctgcggccgccttcatgtgccggcccgggcttttgacatggaacagttctgccgtatggacgggaagctgtccaggacaggagagggaccgtttgttgaggcgtatgcccgtctcatgatgcttcatttaagtgaacagtttccatccggcgaagtggcaagaagctttctggaggatagatgcagaagggacgcggggcgccagcgcaattacgatgtcatctgccgggaatacgcaaaggacagctttgtggagcaggagctggaatatctgatgaaagagccaaccgacagcatgaagcgggccaagagcctgtgccggctcttaaaggccaagggcagcgtgaagccgcaggtggaggtggagccggagatgctgacggtctctctggcctcagattgtcccggacccgttatcggaagaaagcgggagatgtattactcgtgacggtagctgtaaagcatgttggcaaagcagtgtaaaacgtatctgtaaagggtggttccggacgttgacggaccggggacaggatggtacaatgatggatagccatatggaatgacaggaggacaggaatcatgattagaagaaaagacgagatggaggccgttgccaagcacgaggtgcagaaggggatgggagatgtgaccttccacaccttcatgacaaaggaggaggcttacggttcgggaaggaccttcgccagggtcgtgtttgagccgggcacatccattgggatacatgagcatcaaggagagtttgagggatattatgtgctgaagggacaggccctggtaacggataacggcgtggaatccgtgctgaatcccggagattaccacatgtgcaaggatggggacagccacggcattgcctgttacggggacgggaccatggaaatcattgcacttatcatcaatgttccggcatagagatgccggggaggatattttgaccgggacattggaccgggctgcctgttttggaaggattgtttgaatctggttcctggcggacagctctgtatttttgtctgaaacatgtatcgcaatacgtaaaaaatctgtaatgcaatgaataatatattgtatttttagaatccctgtagtaaaataatatcggattatgggttctctgacccgtgtttgcgcataatttcagccagacagcgtatgacgggaagaagctccagggcttccttttcactcagactgtggagttcccagaacaactgctgcttgctgttgcccatggagtcggtttcagggtaaaagatacggtcagcgggaattctcaaagtggttaccagaggataaagcacctcaaatttggggtttccacggaaattttctatattaataatggtacggacatctatgcccagcttctcagccagggaagcctgggacattccctgctcttcgcgggcctttcggatgaccgtacctaaagttttaacgtagtcatgcattgcgattcacctcaatactagtgtacactacacttctcatattatgaattactatgcaatgcatataaataatgaattgaaatacactgaactcctggatgtaatgccgggagggggaaaggaagttttgcatgggtgaagggacagaagacagaaggcaggtgtgcgggaaacgcgtggtgcaggaaccggggcttgaaaaggaatatgcacagccgcttctgacattatttgacgaactgctggcctgggacccggcatcaggggacagccggattatattttacacagagggcagaagccggctgcgggagaaccgtacagagcgggaattcagggcatttgcctggagccgtgtacatccccgggagtgcaggcagttcctggcatttttcagctccgtgcacatgaaagagctttcagcgagcagacatcccgataagctggtctaccggcagaggacggcggagggtgactatgtgtgggtggaggcggtggccatagcagccggtaacggcggcaccatcctgtgctatgtccgtgatatggaaaaggaagaacagaagcggtacatgcaggaacagattatcgaccggtacgtgtacagaaactgcgattttttcctgtgtctggacgggggcacgggttattatgaaatgttgcagaaaaatgacagccgtatacaggggcagatgccttcttcaggaaattataatcaggaactggaagcctgcgtcaggaagtatgcggtgcctgaggacagggacctgcttttggagaaagcgtccatgggaaatgtcctggatgccttggaacgggaaggcgagctgatgatatcttatggggaaaaaagcacggacggccggtatgcccgcaaattgctgcactatgcatactttgacaggcaggagcgcaggattcttcttatgcggcaggatatcacggcagagtacctggagcagcgcaggcagaagaagcgcctcagcgacgcgctccttcatgcaaggattgattctcttacaggcctgtataaccgccaggcagtgaatgccaagatcaacacagccctgagggaggccgcggtgatgccgccttctgtgctgctttttatcgatttggataattttaagacagtgaacgatacccttggccaccggtacggggataaggtgctgtgctctgtggcggagtgtttccgccaggtcctccggacttccgacataatcggaagggtgggaggcgacgagttcgtggcctttttatcgggcgtcacgtccgttggtgaggcaggcgaatgcgcgggacgcctgtgccaggcagtgagccgcataccggatttagaactgaagggctgcgggctctcctgcagcatcggaggggctgtgtgcccgagggacggaagggattacgattcccttctcattaaggcggatatagctgtctatgaagccaagcgccggggtaagaatcagttcgcgttttacgagcctgatatgaagcctcactcctagcccaccacttcaatgtcataggttttcagccagaagttgacctggaggatataggccagcatctggggaccggccatgagctggccgtaccagggttttccgtaatcagaggggctggtgaggaagcggaccagttttttccggtccaggaaatccattacaggtgaatggctgtcgtccatcatttcccttacacggtctgcaagcagtttctcataggcggtatcataggttttaggatagggggactttttccggaacagtatttcatccgggagaagtccttttcccgactggcggagcaggttctttaccagtccgtcccttgttttcatgtcccagggcacgttccagacgtattcaatgattcggtggtccgcaaagggaactcttgcttccaggccggaatacatgctggtgcggtccatgcggttgagaagggtctgcatgaaccagcgcaggttcagccaggcaatttcccggcgtctggcttcctccggggaatcctctgccagcacaggggtctctgccacagagcgctcataggtatccagcacataccggtccatgtccagatactctaagaagctgtcatccagcagggattttctgggggacaggtccatggtccacgggaacgtgtgggcctcaaagcattcctttttatggaaccaggggtagccgccgaatatttcgtcggcgcattcgccggtcagggctaccttgttgtgttccctgaccatggagcagaactggagcatggaggaatcaatgtcccccatggccggcagatcatgggccaggacggaatcaaagagacggtcggcctgggtcaggttgccgcattcaaggtaatgatggtcggaatccaggaatcttaccatctggtccacgtaggggcggtcccgggagggctggaaggggttggcccggaagaatttatcgttgtccacaaagtcaaaggagaaggtggtaaggcgctttccctgttttttcagttcttttgcgcagatggcagataccaggctggagtccacgccgcctgaaaggaaggtacagatgggcacatctgaaaccatctgcctgcgcacggaatcctccaccagaaaagacgttttctcaatggtcctttcatagctgtcctcatggggacggctgaccagcttccaataactatgctggcggattccatccgggccgcatatgaggtaatgtcccgggagcagctcctccatgtcctttagaacgccgcagccgtaggtcctggcaggtccgatggagaacacttcatttaatcccctgcggtccaaccgggctttgatgcccggataggccaggattcctttgagctcggatgaaaatatgagttcttcgtccctcgccgtatagaacagcggttttaccccggcccggtcccggaacaggcacagacggttatgggccgtgtccatgacggcaaaggcaaagatgccgttcaggcgctttacaaagtcagggccgtattccatgtagcctgccagtatgacctccgtgtcgctggagctctggaaggagcagcccgcggccatgagctcccggcgcagttcatcggtattgtacagttccccgttgtagacaatggcaaaggtctgtccggagcctgatttcaccatgggctggtgacctccggccagatcaatgatggacaggcgggcatgggacaggccgccgtgttcccaaagccattgtccggcgtcatcggggccccggtgccgcaagcgttctgccatggcccgcaggacagattcatagtgttctttttctttcaggtaatggtcatgagggttataaaaaccggcaattccgcacataattcattcctcctgtcatgatgtggaaaggtgtttggctgtaaaatgggtaatgtccggcggagacaatccgcctgtatactgcgttccccgggaatccggccgtcagagcatgaaacatgccagggcaaaggtgcaggcaaagccaatgcagaccggtatcaggttccttctggccagttccagagggcttacattgcagatggcggcaaccgggatgagtccccatggcacaatggtgccgcctccaacgaagatagccgtaatctggcccagggccgccatgaccggtacagatgattcggtggcggtccctaaggtcctggccagggcgccggtaaggggaagaccggaaaagccggaaccgtccagacccgtcagtccgcccaccaccatctgtataaaggccgccatatattgggtgaggggggcgttctgtgccagccacagggcccagtcattcatgatgccgcgggtgaccccctcccccatgatggaggtgattccttctccgcctaaaaagaaaaaggcaccgattataataaccggagcaaagatgcggatggcaaagagaaaaccttcggtgacatagccggtgactttttccagggactgtttcccaaagcccagcagagcgcccaggcaggtgagaaggagagcggtgccggagaccatactggtggcatccccgcccttcaggccgtacagaagcataaggataatatccccggcaaaggcaaggggagtaatgacagccaggaacagggcggtcttcctgggtccccgcggcccggaaggttcggcctgtatggagagcctgggtcccctggcatccagctggcctctgtttaacacatatgcgctgaggacagtgacaatgcccatcgcccagaacaaaggccatgcctgccggaggatggaggaggtgtcaaggccggctgcgccggctgagatggcgggagcgccctgaatcaccacatcgtagctcagggcaaagccgtgtccgaacaggttcatggccatggccgcggctaatggattcagacctgccttcactgcaaagggaagcatgatggctcctaccagcgcgaccgaggggctgggccacaggaacagggaaaacagaaacatggtgagtccaagaatccaccaggtcagggaaggggttttcataatgccggccatgggaaccatcatcagatagtcgcttcccagatccttcaggcatttggacagggaggtaaccagggcaatggtggccagcacctccatgaattccctgcctgcatatagaacagcggaaaacacggttatgatgccgccggtgacggatttaaggccgatgaggcccaggatgaacaggaaggcgatgcagacggcaggcgtatcctttttgaggaccatcactgccaggataacgatgacgcctatgagataagcgtagtggagaggagtcagcactactgcggattctatcataataagtcactcctgtatttatggaatataatctatgatatggggaaatgctttcccgcgtgaaaaggaaatcaggaaattaggggttgattttatggccgggtgctggtatgctagataaggattaaattttaaaatgaaaggaagtgaaccggagtggaaggtcgaagtcataagttggaagcagacaattatcataagcgtatggtagtgggagctgggccggcggctttgatcccgctttgctttcactgccgttgatgataggattcatatacgtttatgatgatagccatgtattacaggaggagtctgtaattatggctgttttgttgctgcagcccggtcatccagggcaggactgcggcattttgcgtactgctttcatgatgtcaccattcatggaaggaataagatgcaggagaattttgatttaaaagagctgatggagctgttagatacaatgcagctcaggttactgaaggaaaagctgattgagatgaacgaggtggatattgccgcgttcatcgaggaactggattccgagaagaccgtagtggtctaccgcatgcttccaaaggagctggcaagcgatgtgtttgcgtgcctgcctgtggagaagcaggagcatatcatcaacagcatcacggattacgagctcagcgccattgtcaacgacctgtttgtggacgatgccgtggatatgctggaggagctgccggccaatgtggtcaagcgtgtgcttaagaactccacgccggacaccaggaagctgattaaccagtttttaaagtacccggaaggcagcgccggaagcattatgacagcagagtatgtgggccttaagaagcgcatgaccgtggatgaggcatttgcctatatccgcaggcacggcgtggataaggagacgatttacacctgttatgtcatggacgcaaaaaggaccctggagggtgtggtgacggtcaaggatctgctgatgcatccctatgaggaagttatcggcaacatcatggatacccatgtgatcaaggccgtgaccacagacgaccaggaggaggtggcggagagcttccgcaagtacgacctcctgagccttccggtggtggaccacgagaaccgtctggtgggcattgtcaccgtggacgatgtggtggatgttatggagcaggaggccacagaggactttgaaaagatggcggccatgcttcccagcgagaagccctatcttaagacaggcgtgtttgctttggcaaagaaccgtctggcctggcttctgattctcatggtcagcagcatgattacaggcagcatcctggcaaagtacgaggcggcctttgcggtgataccgctgcttgtgaccttcattcccatgctgaccgacaccggcggcaacgcgggcagccagagcagtaccatgattatccgaggcatggcagtgggagagattgaagccagggatatcctgcgggttctctggaaggaactgcgggtaggcgtcattgtgggcgtcctgctgggactggtcaattatgtacagctggtagtccgttttccgggccaggaaatgctctgccttacagtggtactgagccttctggccactgtcatgctggccaagaccattggctgcgtcctgcccatcgtggcgcaggtcctccatctggaccctgccatcatggctgcgccgcttatcaccaccatcgtggatgcggtgagcttgattatttattttcagctggcctgcagcctgcttaaaatttagggaatgtccagggccggaatcttgcttatatacaggattccggccttttttggttgattccggccctttgattcccgctgattttggccccacaattcgtaaatccccggaaccctctattgacaatggggaacagattttactataatagaagtaagtttaaaacatgtttcaagtctttgatatctgccccgcgtccggcttcagaagaacttatagtatggaggcgtcctgtttcctttagatgcttccggtctttaccatatattccatcaagaaagagaggtagttatatgaaccaggaacagttaaaaatcatgagcgggaaaaaagggtttatcgcggcgttagaccagagcggcggcagtacgccaaaggcgctcaagaattacggaatcggagaggaccagtacagcaatgacgaggagatgtttaatctggtccatgagatgcgcaccaggattataaccagtccctcctttacctcagaccatatcctggcagccatcctttttgagaataccatggagcggaagataggggataagctgactgcggattacctgtgggaggagaagggaattattcccattctgaaggtggataagggcctggcggaggaaacggacggagtcaggctgatgaagcccattccgggactggacgaactccttgggcgtgcggtggagcgccatattttcggcaccaagatgcgttccgtgattaagcaggcaaatcctgcgggaatcaaaaagattgtggaccagcagtttgaaatcgggcttcgcattgccgcttcgggactggttcccatactggagccggagattgatatttacagcccggataaggctgagtctgagcaaatcatgaaggatgaaaccaagaaacatctggcagagcttccggaggataccaagctgatgtttaaactgtccattccggataagcatggattctacagcgacctcatgaaagattcccatgtggtgcgcgtggtggcgctgtcaggcggatattcccgccaggaggccaatgagcgtttaagccgcagtccgggactgattgccagcttttccagggcattgtccgaaggccttaacgcaaatcagacccagggtgagtttgaccgtatgctggcccggtccattaaggagatttatgaggcatccataacctgagaataatcatcctaacctgggaacagcacacataatctgagacagggaggctccgctattactgcggagccgtttttgcgggctggcaacagatagcaggtcactggactgatttggcggcctgccttatgtttacaaggactgttataaatgatatcatataaaaagatgtgatgaacgtgtatcctgataaaagggtgcagaagctttgagttatgacaagaggaagctatgaaacgaaagttaattggaacatggcatgccgcggcctttttaacgttctgctttgtgctcgcactgacggccagcggtgttttttacaatcagcgggggaagctggcaggggaattcggaaacatggtggcggctaacctgacctcttatacccaggcccagaaacgttatctgaacagctccatcacggatgcctggaatacactgaaagggatttcaggactggttgaacagattgtcccggaatatacggaggattccctgaacgagtatctggaccagcttaatttgcagaacagggactatatgatagaatacctgtccctgaaagagctggagagaagactgaggaaccagcaggcggcggaacgtgactggaccctgttccgtaagattgagcagggaacaggcgtggtgtccgatatatgggactggaagaaggcgggaaaccagtctgtgttcacggttgcggaaccggtctggaagaatgggaaagtgattggagtgctgcagaccagactggagcccctgaccatcacggaacaggtgcctgaagccagtgcgtttacgcgcagcagcaccctcattgtgagacgtgacgggaccatccttgccagtgagaaccacaaccggggcgatatatccaccgggaacctgtttgtctccgtaaagacatccggcattacggatgaggtagtgaggcagatggaagaatgcttctacggggacgggtcagacagctttatgtttgaggggaagggggattcctattatttttcctgggattacctggggtataatgaatggtatatcgtgaattttgtacgctcgccggatgtggccattcattatgaaaatattttaaaggagcttatctatgccagcctgtttctgattggccttacggctgtcctgggcggcggaatcgtagtcttgtttctacattaccggagaagccttgattttgagactaagaagtacggtctactggcggaattttctgacacggccctctttgaatacgacaggagaaaggatatactggaatttaccaacaatgccaggcgcatactgatgctggatgagctgagaatcagccatgtcatgggaaaaaagatcaggacagacctgttcctccaggaggacaggaaggttatggaggatatgttaagaagcaggaccggcagctgggaggacaatatccagtatgcggagctgaggcttaagagtatttccggtgagtatcactggtttggctgccattataagaccattacttctgatacgggaaccgttgtcaaggtggtgggaaagctggcggacatttcacggcagagaagcagggagcaggagcttcgggaacaggccatgcgggacgtgcttactggaatctacaacaaagcaggtgaaaggctgattgaccggatggttaaggaaaaaggacagggactgtttctgatgctggatttaaatgattttaaaagcatcaacgacaccatgggccatgcggcgggggacgccatactcactgagctgggaagggtcttaaaaggaaactgcagggaaaatgatatagtggcccgcattggcggggatgaatttgtcatgttcctgccaggggtatttgacaggcagacaggaaaacggaagataggggaaatacaggaaagtctcaggacagtcaggatatctacctggggcattaggggaatcaaggccagcataggcgccgccctgtgcccggaggacgggatggattacgggactctgtataaggctgcggacgaggccatgtatcaggccaaggagcagtccaaaaaccggaatgagagcggggaggcaggagaagaaaaccatgacaggacaatatcatgacaggaggagcatgacatgaggcatgggtggggaagtgtgattttgtcgggaggacagggacgccgtatgggcggtatcgacaaaggaggactggactttaagggagagtctttccgcgggcatatccagaagcagcttcaggccctggaaatcccatgttacctgtcgcgggtctgctatgggggcaggggggacagggaaggcggactggaagtgattgaggatgccgtaaagggggccaagggacagtggattggccccatgggcggcatatggtcctgctttcagagcacaggacttgaggggctgttctttgtctcatgtgatatgcctttattcaggaaagagatggcggtaattctgatggagcgttgggaaccgggggcggacgcggtgctgtggaggaccagggacggccgtatacagcccatgtgcggcttttacgcggccacctgtatggaggctctgggagacacgatccgtgggggaaattaccggctgatgaagttcctggacgctgtccgctgtattgtggtggatacgtcagaggcccacataccggatatatggtttgccaatgtgaattctccctccgcgtacaggagcctgggagagcttcgcacgcctgtgatggccgtaagcggcaggaaggataccggtaagacagcccttttagagatgctggtcagggaactggccagagtgggaatccggtccgcggtaatcaaacatgacggccatgagtttgaggcggatgttccgggaaccgacagccggaggataaaggatgcgggggcatacggcacggtggtgtactccggcaccaaattttccatgacaaaggagcagccttccatggaggcagaggatttcttcggtttcttcccggaggcagacattattttcctggaagggcagaaatattcggatgttccaaagctggaggtgttgagaaaggaagtctccaatgtcccggtgtgcaggccggaaacagtgctggcttatatatggagcggggagaacggctggagcgaaaatgccggtccggccggggaaagccgccggaatgggaaatgtcccgtgctcacagcggatcagaaggaccgcatcctggaaattgtgattgagcacatggacaggtacagccggggagacgaaagggatgagctatgacagcaaaggaagctttggagaaggcagactttttcagcgcggccagtgcaggcagccgggatgaaatcgcgggttttgcctatatacgcaggtatggcaagggagcgcacgtgttttatgacagggaggagagtacatgcctgtattttctggtggagggcgtggcgtccctgtataagatcaattccctggtaatggtgctgccggcagaccggtttattcaggttatggataaggacggcaggctggccagggaagtcatgggggccatggctcttaaaatccgccggctgtaccgccagcttaagaataccaccaatgcccccagcggtgagaagcgcctggcggcaaagctttttaaactgggcaaagattacggggtatgttcaggggacggaactctgattgaaatgaactcttcgattcttctccgcccaaagcaggccttgcggtaattggagaatattcttaacaacatttaatccaaatatagtgcagggtatcacttgatttttcgattactccatgattatctaaggctgtcttaatggatgccgtattgtttttgtgaatggtcagcagtgctttttcaatgcccatgtcagaacattcttttattaactccgagagaagtatcttaccaaatcctttattcctttgaccaggacgtatggaatagcctattgttcccccgtcagcaaggagtttatcggtcaaaatatgacgtatttttccatatccaactggtttgccgtctatgaacagccagtaaatggtctgcggaaccttccatccgtcaacgagacctgtttgattgccggatgcagcattgtcagccaaccaggacttatacgcatcaattgacgtgagggcaggggtgatgaatccattttcattttcaggaaattcctgtaacatttcatatatgtcatcaccgtcgctggggcacagtttttttagatgaattttcatagtcgttctgcctcctgtaatggaattgccgtatctgttatatgaagcccatgacttatatacataattctaatagttggggacgtatctgtcaaatgcagaagcactttcttttactccttttttccgaacaaggaggagctgattgtggaggccctttatccgcagcagctcaaactcatagaatatgcccggaaactgatgaacgattcggtcctgagatggagggataaggtgaaaatgtttctccatgttatggtgaaaaatatgggctcgcggttttgacgatggaagagcgacccctgatcttcaaacgtttatccggggaaagttataaggtgttcagagataaacaattcagtcttttacgtgtcatattaaaaagttttgagattgaaaccaatacagaacagcttaaataaattggtgctcaatttgccgttactggttcctgaggcttctgatgcggctgcggaactttaaatggaggcgcttgcggattacctggaaaaacaaaaaagtaaacgaatcttacaaacagaaaaagcagctgcatacgcctgaacagtatgtcccgactccatatccgggcggattttatccagacataataagtgcgaaataagaaaacactctttattttctgcctttgttatgaagcgtccaccgtaccatttgaatagttacctacggataaatgagaggattaaaagagggaattcacataacgaacagctgcggacataaactgtctcagtttaatcaaaaagagggtttaattccccgcagcttgctgcgtaacaaactttttcaagacatggaggaagtgatatactagaggaaaaaggaaaggagaaattgtgtgatgagtgaaacaatacgcaagtcacacaatgtatcagtactcatgtatcatttcgtatgtccagcaaaatatagaagagtagtaatagatgaagatgtagatagggtaatcaaagaaacgtgtgagggaattcaggaaaggtatgaaataagatttttggaagtaggtacagataaagaccatatacattttcttatccagtcagtgcctgcatatagtccaaaaaaaatcatccaaatagtgaagagcatcatagcccgggaggtgttcgcgaaatgtccacaagtgaagaaaaaattgtggggaggagaattctggacagatggctattacgtagcaacggtgagtgaacatgggaatgagcaaatcataagtagatatgtgaaagaacagggacaggaaaaaaattataaaacaatctataaaaacgtagagaaaacaaagcagtatagcatatgggattatatgtagaggttgcaaccttcgataccccgcagcttgctgcggggtagttcatttgttgtttttcaccggatagctcattttttcatttttgccgacacttctattcgaacaaaaggaaattaaatttttcataaatcatcaaaaataacgcagaaccaaaaaatcttttattttcctcatataaccttgcgattgggtaaaaaataagacatcctgaatacaaaatccagaatgtcatggttttctcggaccaatatgataatagatcatttttccagacaaaaacgcttcgttccattttccgtacacaccacgcgaaaattaaataacttcccatctgtccagaattccattgtatcaaggatcctcatcacagtggtacgattaatcaaatgctctttctcagctgcgaatggtgcaaactctcgattgatccaatccgtgatctcggttatcgtaagtggtctctcttttgttgcatggttctccaatatatttaatattaaaagtggaaacatcgtcggctgcatagtattttcctctctttcagcacgaaaaaaagaccccgccagggcctcttttgtttccatccttatcgtctcaatcaggcatctggcagttccggtttgaagttacgccaaaaagtccgctgccatagcatgaactgtataatgaatacgagctcatactgacaccggactgcccataacttgactgatgtgcaaatcgtctgactgccatgatcatttcctcctgctgatattttctaaagccagtatatccaacttctggatatctgtcaagcgcagacggaaggattcgaaccttcgtgccggaaaagccgacaaactccttagcggggagccgcattaagcctctctgccacgcctgcatataagtgcgccgggctggatttgaacctgcattgtttaccacgtgggtcacggttttacagaccgctcgcttcagccttttacatacctgcgcatgattggattctctttcgagatcacggtgtgggtgggattcgaacccacgagccggaagaccggatgacggttttcaggaccgcctgcttatagcctcttgcataccacaccagatacggagatgctgggattcgaacccaggcgtctatttaagacctgtcagttttcgaaactgaactcttcaaccacttgagtacatctccttagtctacccgaattcgataaactaaatcgctgatcgaatacagagcgaagcgacaagacccggattcgaaccgggaatgcgacagacccgcaacggcacgcttccaacgtgctgccttaccgttaggctaccttgtcagaatgggcagagatggactcggaccatcgatgtttcctgcgtggctgatttacagtcagctgccttcgccgctaggctacctgcccttcatcttatgactgtattgtagcagatgaggatatgcaaatttgcactgattcttcttttttttgattgttaataaaaaaaatacgactttataactttttaataaaaaaatatcgtacaggacactttggtgtataattagtttgccaacaaaatatacaaaggaaagtgaccctgtacgacaaactcattatacaacgaaaagaacctgattggtagacttcatcaatatttttccatctattttaaaaccttttcttccctgccgcggagactttattcctactggctttatccatacttgccatggagtcggcggattccatccgttccctctaccgacattttttgtctgccatcacccaaaggtcactgactgctttttattatgcctgttcctactccaaagcagactattccagattcatgaatgtaacggcatccctggctttaaaactcattcctgactccctgaagtcacagccggtcttcttctgcattgatgataccatgatttctaaatttggaaggaaatttgaagatgtttcaaaactttttgaccatgcagcacacaatggctccaactatctgaacggccattgctttgtcagtctcatgctttgtgtccccatatggagcaaccgccggattgcttatctggctgtccctctcggttaccgcatgtggcagaaaaaagaatcgaaactgaagcttgccgcagccatggtgcgtcaggtcatgccctcttttgcttctcagaagaatgtcataatcctttgtgacagttggtacgccaagaaaaatctcgcctgtattgttgatgaatatccaaatctggatttgatctgtaatgccagggctgactctgttatttatgaccttaccccacagccaaccggcagaagaggcaggcccgcaaagcatggggaacgcctttctattaaagaggacttcactctttctgctgaaaagataggggattactacatgggtgtacgccgggtccttaccaatatcttcgggcaaagggaggttcccgcctatgtaacttctacagagaaaaccggcggctccagacgcctgtttttcagtacgattattccagagcagatgcagatattctgcgcatggcaggaaaaggcgccgctaaaccagaccgggagtgagcgtatgcagttcatcccattattgtgttacacatttcgctggaatatcgaggtgagttattatgaacagaaaacgttctggtcgttatgcagctatatgttacgcagtcggaagggaatcgaaatgttggttaatctgatcaacatctcgtattgtgccatgaagatactgccatatcaggaagaatcattttcaaagtaccgtacagaaagtgtgcaggaatttcggtttgcccttagtgagcaaatccggcagcaggtattttatgccactttcgtgagaaatatcgaaaccagcataaaatccagtgttgggccccggcgctcttttttcgccggctctttgtattggcgtttgacgccggccttttggcattggctttttcgcattagctttttggcatcggccctttgtcaaagggggaaatgtcacagcgggagggggaaatgtcacagatttccgcttgacgaaatcaggttcccttgctatgataatatcaacaagtgttatattgcttgtagaacaaatataactttccttgttacacaaaacgaaagatggtggttttatgttcttgaagattgatttcaacagtgatgaagcaatctatatacagctgcgcaaccagattatcatggggattgccacggacatgatacgggagggggatactctgccctctgtccgtcaaatggctgattatatcggcatcaacatgcatacagttaataaggcatattctgtgttacgccaggaaggttttgtaaagctggaccggcgcaagggcgctgtggtcagcctggacgtggataagatgcaggccattgacgacatgcggggagacctggatgtggttctggcctggggtatctgcaagaatatcagccgggatgaaatccatcatctggtggatgagatttatgataaatacacccgcgggtgtatggggacggaagacggccaggagaccggggaaggttagaaactgccggaacatgggcggcggttgtccgcccgtatattcaggcatgttctgaaaaaaggccaggaccgtgctgtgcagaaagcgcgggtacggttttggatattaatggaggattcgtatgttatgtgaaagatgtaaaatccgggaagccacgatcaaatacactgagataatcaacggcataaaaacggaacataacctttgctctcactgtgcgaaggagatggatttcggccagtactccgccctcctggatggggagtttcccctgggaaagcttctttccggccttctgggtctggaggatgacgaggaggaaaccgatgtgaggggaagcgtagtctgccccacctgcggaaccagcttcgacgactttgtggagaacagccggttcggatgcgctgactgttatggcgtatttgatttgtttatcaatgataagatgaagcaacttcagggaagtgagagccataagggcaaacatcccaaatacagaagtacatttgaaaaggaacacccggaggcagccgggggctccggggaggaaacccaggggaacacagactgtttgacagaggccggttcccgggattcccagaccgctgtggccagaaagcagattaaggagttagacgccaagctaaaggaagcagtgcgccaggaggattatgaactggcggccagctaccgggaccagattaaagaactgaaaaaggaggctggaatccatgagtaaatggtttgaggaaatagactgcaaaaactctaatgtgatatacagccgtatccgtctggccaggaactgggatgaatatgtgtttccctccaggatgaccgccacgcagtgcggcgagatggtggaacgtctcggggagggccttaaagggcttaaggaccaggaaggccgggatttaagctacagtcagctggaccagatgcaggagctggagaagatggccctcagggagcgcagaatcctcaacatggcctgcgtcaacaggaaggagccgtcaggactgctgctgtcagccgatgagtcgggcagcatagtcctgggcggggatgatcacatccgcatgcagatactgtcgcccggactcaaactggatgagctgtggcagaaggcggatgttctggacgattacgtcaatgaacggttttcctatgcctttgacgaaaaatacggatatctcacctcctttcccaccaatgtgggaacaggactgcgggcctgtgtggtgcttcatctgccaaccttatcccaggtgcgcaagttccagagcattgtggcggatatgagccggttcggaaccgctatccgcggcctgtacggagagggaagcgacaactatggaagtctttatgaggtatccaaccagaggaccctgggacagtccgagaaggaaatcgtggaattggttacaaaggcagcggcccagctcaacaaccaggaaatgcgggtcaggagcgccactcctaacacccagcgtctggagcgggaggatgaggcatataagtcctacggcgtcttaaagtacgccaggaagatgtcggagaaggatgccaggatattcatttcccagctcatggcaggggaagaggacggcctgatgaaatttaatgaggaatgctccctttacagcctgattataggaattaagcctgccaatttaaatctttgggccaaacggcctctggataaggatgagctggacgctgtgagggcagcttatataaggcagaatctgcctgagatagtctagctctgccatgggcagagccaggtttaacacacttgcaaggaggacatgacattatgatggaacgatatacaccacaggcccaggaagcgcttgggctggcagtgggcgtggcagagacgctgaaccatggttacgtgggcacagagcatctgctcatcggcctgctgcaggaagggaccggagtggcggccaaggtactggaggaaaacggagtggaggaagaccgcgtcattgaactggtgagccagcttatcgcccccaacccaacggtacagaccgcggacaggacggcctatacccccagggcccgccgtgtcatagagaacagctacagggaggctgtccgttttaaggcagcccagataggaacagagcacattctgattgccatgctgagggaaggggattgtgtagccagccgccttctcaacaccatcggggtcaatatacagaagctctatattgatctgttggcagccatgggtgaggacgcccctgccgcaaaggatgaccttcagggagccagggccggaaagcgcggcaatgccacgcctaccctggacagctacagcaggaacctgacccagctggctacagcgggaaaactggaccctgtcatagggagggagcaggagatccagcgcgtgatacagattctgagccgccgcactaagaataacccgtgtctgattggcgaacccggcgtgggcaagacagccgtggtagagggtctggcccagatgattgcgtccggcgatgtgcctgaaaccatagcagacaaaagggtagtgaccctggacctgtccggtatggtggcaggctccaaatacaggggtgagttcgaggagcgtattaagaaggtcatctccgaggtggtggagtccggcgatgtgctgctgtttattgatgagatacacaccatcatcggggcaggcggggccgagggcgctctggatgcgtccaatatattaaaaccgtccctggccagaggtgagattcagctcattggagccaccacgatcaatgagtaccgcaaatatatagagaaggattctgccctggaacgccgttttcagccggtgaccgtggatgagccttcagaggaggagtccgttgccatacttaaggggctcagaagccgttatgaggagcatcacaaagtagagataacggacgatgccctggaggcggcagtgaagctgtccagccgttatattaacgacaggtttctgccggataaggccatcgacctcattgacgaggccgcttccaaggtgcgtctccagaactacacaaagccggataagattaaggtatacgaggctgagattgacggtctggaggaagccaaggaggaggccatcaagaaggaagcctacgagaaggccggagagataaagaaaaaacaggaaaagatacgggaaaagatagctcagaccatggaaaaatggcagaaggacaaggagagcaaaaagctgattgtcagcgacaatgagattgcggatgtggtatccggctggaccaggattccggtaaggaagctggctgaggaggaatcagagcgtctgagaaatctggaaggcatcctgcaccagagggtggtgggccaggaggaggcggtaacagccatttccaaggccatccgcagaggcagggtaggtcttaaggaccccaagcgtcccattggctccttcctgtttctgggtcccacaggcgtgggaaagacggagctgtccaaggcattgtcagaggccatgttcggtacggaaaatgccctgattcgcgtggatatgtctgaatatatggagaaacacagcgtatccaagatgataggatcgccgccaggatatgtgggatatgatgaaggagggcagctcagcgaaaaggtccgccgcaatccctacagcgtcatcctttttgacgagattgaaaaggcccatccggacgtgttcaacattctgctgcaggttttggatgacggccatatcacggatgcccagggacgaaagattgactttaagaataccattatcatcatgacctccaatgcgggggcggagaatatcatttcccccaaacgtctgggattcggcatggtaagcgatgccaaggcagattatacgttcatgaaggaccgagttatggatgaggtgaaacgcctctttaagcctgagtttttaaaccgtattgatgaaattatcgtgttccatcagcttacaagagagcatatcaagggaatcgcggatatcatgctgggcaccatcagcaaacgctgcaaggaacagctgggcatagggctggaggcaacggacagcgccaaagagcacctgatcgataagggttatgacgacaaatacggcgcaagacccctgagacgcaccatacagaatctggtggaggaccggatggctgaggagatgctggatggcagcatcaaagccggctccctggtggaagtgggatttgacggggaaaagcttacctttaccgtgaaggcaaagacagccaggccgaaggcagcctccaaaccggcctccaaaccggccgctgccagggaaggttctgaagatgagggaaagactgtgcggggcaaaagcagcgccggacgcgctacaggcaggaaaaaggagaccccggcgcctaaggtttaacagcatctgtagcagtttatacaaattaagaatattttcactagttatttttcggtaattgttgtataatttttatgaagaggttatacttaagcacaattagcaggaggataagaagatgccggtcattgaagagttaatctgcatagagcaggatggcaccattagttttggcaattacaagttaggacagaaggctaagaagtccgattttgaatatcagggagacatgtataaggtcaagacctacaacgagattaccaaactggagcgcaatgacatgtttgtttatgaatctgtacccggaacagcggcagagcatttcaaggttacggatgaggacgtggaattcgcggtggaaggcagcagggatgcacagattaccatacagcttgagaacgatacagattacgaggtttacgttgacggtgcagccgtaggcagcatgaaaaccaacatgagcggcaagctcagcgtgagcgtggagctggaagaaggggtatcggttcaggttaaggctgtaaagagagcataaaacttaagtatcatacaggctggaagcgattccagcctttttctgtcagtttttacattttattccatgaatattaggaggctatcatggcaaaagcgaaaaccaccgcatttttctgtaaggaatgcggatatgaatcatccaaatggatggggcagtgtcctgcctgcaaagcctggaattccatggtggaggaaccggtgtcaaagtcagctgtcagtcagggcggtttagggcgcctgtcttcgggaagccagaaatccccgattccggcagccaaaccatcccttctgtcagagattgacatagaggagcaggaccgtatatccacgggctttggagaattggaccgggtgctgggagatggaatcgtggccggctccctggtgctggtgggcggagatccgggtatcggaaaatccacccttctgcttcaggtatgccggaatctggcaggcgcgggacagcgggtcctgtacatatcaggggaggaatccctgaaacagattaaaataagggccaaccgcattggcccggtaaccggagagctgaaattcctgtgtgagacaagcctggagcatattgagagggccattgacactgagaatccccagattgcagtcattgactccatacagaccatgtacagggaggagatatcctcggctcccggaagcgtcagccaggtaagggagtccacgggaatcctgatgcagatagcaaagagccgcggaattgccattttcgtggtggggcatgtgacaaaggaaggcgtggtggcaggcccaagggtattggaacatatggtggatacggtactttattttgagggagacaggaatgcgtcctaccgcattctgcggagtgtgaagaaccggtttggctctaccaatgagataggtgtatttgagatgcaggaacaggggctggcggaggtggagaatccctccgaatatatgctggacggccggcctgaggaagcctccggcgcagtggtgtcctgttcctttgagggcaccaggcccatccttttagaggtacaggccctggtgacggaaaccaatttcggtatgcccaggcgaacagcggccggtacggattacaaccgtgtcaacctgctgatggccgtgctggagaagcgctgccgctatgagatgtcgcggctggacgcctatgtgaacatcgcgggaggcatgaagatgaacgagcccgccctggacctggccattatcatggcccttatgtccagctacaaggacaggcccgtggattcaaagatgcttatattcggggaggtgggcctgtcaggagaggtcagggccgtatcccaggccggccagcgtgtgaatgaggctgccaagctgggttttaccacctgtgtgctgccaaaggtatgcgcggataagatgaagcaggtggagggcatacgcctgattggagtttccaatgtgcgggaggccattggaatcatataaatggaagcatataaacggcagaatagaaatggaagcggcaggcgggggtgcggcctgccgctgtcccggctctaatccttctccgttgtccggttttcaatatgatatggctgctgcggtgatttcatggttttcatatttttgcaaatatcaggaaaaacactttttttgaaaaaacagttgacactttctcaaacctgtggtatcctaattgaggttcggaagggttccaaaccaaagagataaaccataggggaatagttcaatggtagagcagcggtctccaaaaccgtagatgggggttcgagcccctcttcccctgctgactattttaacgaatagcccaacccgaagagagtcgagaaatccttattttatgagggcactgaaaaactcccgtttttttgtgggagtttttctttcttctataatatagtgtcagagattatgattcactaaaaaatatgggctgttttatcatccggccagagagtatgaaaaaaagtctgtaaattgagatcttctatgataagttaatgagaaaggtaggtggatgtcgtgaccacctacctttactatacggatgcttttggattctgtcaagatgtattggaaaatcccatcaaattatggtacacttcttacaggaaaacatcaggaggtgtgccatgaagctaaaaacagacgatccctttgtacctgaagatatcagggcaaagatcaatggactgcagtccctgctggatcatgcagccgacttatacagtgatatctatagctggtatgacagtgaactgaaatcctatgacccgaaagccaccgcagacgatgaactgtttgaccctggcacagggactgttgtggaggggatcgattacctgtctatcatggaatccctgtcagagctgcagacagccaacgaatgtaaaatgcagagggattaaccttgtgtcccatcggcctggcctctggcgatgtcttcccgtatcagggccttgatggccccttggacggaagtgtccctgccatatttgtgctgtctgacccaggccaggatatctgcatctgtcttcatattcagttttaacttcacctgtacagtattatagctgtcgtacctgtcctgagcatcgtattttgaaaatccatacatggaaagctcctttccggataggtgtacacctatgcctgtgcgctcttattccggcagtctgccttcgtacataatggacagttccccatagacctgcccccagttgcggatgggcatggtccacttcttcgtcgcctcgaacgtggccaggtacagagcctttaagagcgccgtgctgcccgggaacacgctccgctggcggttgagcttccggtaggtagagttgaggctctcgatcgcgttggtagtatagatcaccttcctgacctccatggaaaacttgaagatgggggataccacatcccagttgtcatgccagcgtttcattgagttggggtactttggcgtccacttttccgtcaccttctccagcgcctccagcgccttttcctcgtttgcggcatggtagatggttttcaggtccgtggcaaatgctttccggtccttgtcggagacgtatttcagcgtgttccgtaccatatgtacgatgcagcgctgctgctccgtcttcgggaatgccgccgttatggcttccttaatgcccgtgagcccgtccgagcagagaatgaggatatccttcacaccgcggttcttcaactcgttcagaacgcagagccagtacttggagctttcattctccccgatctgtatgctcaggacttcctttttaccttccagcgtaaggccgaggatgacataggcggcaagcttgcggattaccccgtcctcccgcacggaataatggattgcgtcgatgtagaccacgggatagacttcctccagcgggcggttctgccagtcttcaatctgcggcagtatcttgtccgtcacgtccgagatgaacccttccgaagcctcaaaaccataaatgtccatcaaggtatccgagatttggcgggttgtcatgccttttgcatacatggatatgatcttctggtcaatgccggaaatgtccttctggcgctttcttaccacctggggttcaaacgtggacttcctgtcctggggcacctggatgtccatgctcccgaagctgctgttgatccgcttgggcttgtagccattgcggtaatcatccgaatccgaccgttctgacctcccatagccgagatgctcatccatctccgcttccatcatctccttcagggtgctccccagcaggtctttgagggcttcctggatatcctccgcagtctggatgtcatactcttccaggagctgatggacgatgttccttttcccctccgtcatgactactttgtgtacgggctgtttttctcttcttgccataataataggcctccttatgataatagattttatcatagaagacctaatgcttaatagctatttacagaaaaactttcatactctctccggccagtgcaatcaacttcgttattctcttaatatttgctacgaatgccgtaaaattcatttgcaattccatagcaaacaatcccactgaatctgctctgcctaatccgtgggcttcctttaattccccattcttttcttcaatccggtgccgtatcttcaggcgttcttgaaattcttcgcttgcttcaaattccagcctgctccggttcttttctcttgcttgggtaatactatagctgtgggttttccacttccctactttacactgtccttttagagggcacttttcgcattttttcttgctgaatacgtaattccggtactggttcccgttctttgcctcccgcttctcaacccgcatggccagttcacctgccggacattgcagcatctttgcatctttgttaaaactgaatccttcctcaagtttcgcttccgcagcagccgcggccgcaggatttattttcgtaagcgtcaaataagaacgtgtagtgaaatatttggcgttctcttgtaaacttggggttagagtttttagagttccctcccaaaactctaaatccagataaaggagaataccaatggacatttccgctttaactccggataaacaggtaaaacttcagtactggctggacgtgatccggcaatgcagagcctccggtctaacaaaccaggcatggtgcgaacaacatcatatctccctaaaaagctattactactggatcgcaaagatccggaaactggcgcttgaagaactgccccgaaagagtcatggatgcaggccggtcatggagcagactgcgttgattccggatgcggctccggaatttacggaggtatcccttcacggcaggcaggatccctgtgccgctcctgcagcagtactccgtgccggtacggtgactgttgacctctttgaagatacgccccgcgagttgctggagaccattctgaaagcggtgagatcatgttaggtgacctctcccgggtggaaaagatctatctgcgcaccgggtacacagatatgagaaaacagctggacggtctggtggatatcatccagtacagctttcagcttgacccttacagcaattccctgttccttttctgcgggaaacgggcggaccggatcaaggcagtccattatgaaggggacggcttctgcctgttctataagcgctacgaaaacggccgcctccaatggccgcggacgggcgaagaagccagacagatctcccaccagcagctccgctggctgctggagggcctgaacccggagcagccaaaagcggtccgcagctgggttcccccgaagcctgaaccccccgggaattccttataaatgctggaaaatcctgctgttttatggtataattcttaaggaaagtatcagattcagagcgacaaaaaaatgaacagcttatgcaaaagataaactgctctgaatgtgattctttccaattgtaccaagtcgcggaactttagccataggctgtatggggatagtatttccccagggaagcttaaaatagtggattatggtggtctgcaatgcagaagcaggacgattttagctgtatcccatatttttgggtatgcttcgcagacctcccgatggcaggtcttaaaaaatatataggaaagcagcctgtcaggaagaaggaacatgacaccttcccagctgtttcatggctgtatgaccacattcaggacacacacagatatcgaaattccagactgcttttaaaagctctgccagggacattccggcgtaacgctgcttgaaacgctgtccattctgaagcttaaagataaccttcagattcttatatttcatccgattgttcagaaaaccataatagcgtattttctgaaagccggaaggcagcacatgcatcaggtaacggcgtataaactccgtgttgccaagagtaatctgacgttttggttcacccggcttttttccacgggcagagaatgttaccgtatcttccgtaacagaaaggatcctgctgttagagatggcgattttgtggatgtagcgtccaaggtattcaatgacattgccgaagccgttgaaggttttcttgatgtaggggcaccagtccatttcataaagcttatttttaaattccttccagtggtaagaattacgcaggttttcacaggaggatgaaaagttaagggagccgctttcataaagggagacaaggtgtgccatatatttccccttaaacttatcccgcaggacctccgtacggataaaaaacttagatgaggatttacggatttttccatctccggtaagcccgccgccggaaacaatgcagtgcatatgtacatggtaatccagctcctgattccaagtatgaagtacttggataatcccgggtgttgccccgagccacttcttatcagcagataattccagaagtgtttcggcgcagcatctgtgaagaagtccatacagaagcttctggttgcagtaaatgaggggatttaattcatgtggaagtgtaaacactacatgaaaatagggtgaatcaatgacctcagcactgcgtttatctacccagatttctttcttcacagcctgacagttggggcagttgcggttgcggcaggaattattgtggacttccacatgcccacagtcggtacactgacttaagttgacaccaagccttccggatttgcagtttaagatggctcgggcggctttgcgttggacatccgactgatagtgccccggtgctgagaaagcttcataggactgctcaaatatctgcctgattttgtaatcactcatggtattcacctgccaatcggtcaaaagggctgacggcattgcggatggcattaccggaaagatggacataaatagtggtggaagacaaagatttatgtcccataagcgcttttatggtaagcaggtcggttccgttttcatacagatgggtaccaaaagcatgacgaaaggaatgacaggtaagcctgcgttcccatccgagcctgtcctcatgggcatggatgtgtcttgaaaggaagaatgtgtcgatgggtctgtcctcgccactttgctttggaaaaagaaagccttttggtctgccgtattcaaaccagtagcgtgtcagcaggtcaagtgccgctttagaaagaatggcatagcggtcattcctgtttttggagtgtgtgatgtgaagccgcatgtttttgcggtcaacatcctcgtaacgcagacggcatacttcaccgatacgaagccctgaggaatacatgagtgtaaccatagtcttctgctttaaatcaggtatggaagaaataaactgccatgtttcctgtttcgagggaacatagggaaggtactcgtcaaacttacgcatgggaagctgtgtgtcatcccatgttttgtgaagaacatacatggtgaaaaagcgcagttgtgaaatggcacagttgatggtgcggtcagaaaggtctctggatttctgtagccatttgatgtagtcacgaagttcatcccaggaaacatcttctggcgatttgtgaagaacatttgcgaggtaatccagatacgcccggatgtaagtacagtaatttttaagggtatggtcggtaagaccgcgaagggaaatcatttccctgaaagaatttaaatatttgtccatagtaaaatctcctttgaaatgcaataaaaacagtagttacatttcaaaaagaggtggtggacgagtaaaaaaataagatatatagttgttgagtttagaaatccatgataacataagcatagcagttcttaaagttatgaagttgtttggtgtggtaacttaacaatacatcataaatttaaaaactgctattttttataaaaaaagtggtggttttatgtaccttgggctagccgtcgcactagcgacttggtacaatgaatttatcagaacaggaaggttttcagcccatgcaggatacagagcaggagtaccaaaagcagatcaaagaactggaacagcaggtccggctccttagggagcaggttgatttccttacccgtaaactttatggaacaaaatcagagaagacgtctgcccttgaaatagagggacagatgtctctttttaatgaaatggaatcctgtgctgagccggatgcccatgagccggatctggtggaggtcgaaaaacatctgcgtaaaaggaaatatgccggccagcgggaaaaactgataaaagacattccccgcagcaaagtgctccacacgatcgatgaaagtgaacagatctgtgagagatgcggaggtaccatggtaaaagttggtgaggagtttgtgcgtaccgaggtacagttcatccctgccagcctcaaagtggttgaccattaccgggaaacctatgaatgcagggcatgccgcaaaaacgggacgccttatatggagaaatccccggtgccccatcctccggtcatgcactcccttgcatctgcttccacgatcgcatggcttgtccatcagaagtttgaactgggcatccccttataccgtcaggaaaaggaatgggaagccatggggctgtctttaagcagggcaacgatgtcaaactggctcctggccgtctgccgggactggctttcccatgtggtctcccatctcagacgggaacttctaaagcagggatatctgcatatcgacgagacccacgtgcaggtgctgaaggaaccagggaggaagaacacttcggattcctatatgtgggtgtactgcagcaccagggacagcaaacggccggtccggtattttgagtaccagccggggaggggtgggaaatatccggaaacatttttaaaaggctataccggatatatccatacggatgcttattccgggtataatggggtgaaaggggttacgagatgtctgtgttacacacatctgcgccgcgcttttgtggacgcgctgccaaaagacatccatggcccggaagcctcaaaacctgcggaagcagtcattcgtctgaataaactgtttgagatagaaaaggaactggacggccttcccccggaacaaaagaaaaaagaacgacttgaccgcgagaagccgcttctcgaggctttctggtcgtgggcagagataagctctgccggggaattgccaaagtcgaagctccataccgctttccagtatgccctgaacaaccggcaggagttcttcaactatcttggggatggaaactgctccatcagcaattcccttgcggagaactgtatccgcccctttgtgatcggccggaagaactggctgtttgccggaagtccgaagggtgctgccgcaagtgtgggaatctacaccctggtagaaacagccaaagccaacggcctggatgcaatgaaatacatcaagtatatcctggcagatatgccggggagtagatttctcgaaaatccggaatatctggatgactatctgccatgggatcccatggtgcaggaacgttgccgataaccactgcccttttagtatagagggttagtggttatttttctatccaccatcttatttgacgcttacattcttagatttagagtttttagaattcactcttgaaaccaatgtcatttagttaactttttgtaaaagaaagaatgtttctttaaaatagagatctgacgttccaaacggatagattgaagagaaggatatagggattatttatcagaagtagttttgtaaatattttaccgcaaggcaaacaagcagatttacatctgcttcaaaaaagggtattatagatattgatgaaactgttacttatgctgctcgatatataaaatatcgaggttttcggaagtgtgccgtttggagtcgtggatactgtcgatcattccgtatcggaatcagctcttttgtcagcagggacatcacatctatggagtctttctctgtgttcggacggagaaagactctacaaatatgagcagccatactgaaatttactttgtattcatatttcgtgtttcccttttctataattgcatgattgattagtgtttctgttatgttgtaagcgattaactttgcccaaatttcctgtttgatatattctggtttgtaggcatggaagttactcaatccgaccgtatatttcagcttacggaaagacccctcaatggcccatctggcatagtatagaagttttatttgttccgacgggaattcatctgaaggcagattagtgacgatgcattcataagaatcatccgatatcggaaaccgtacgattctaaaagataaatcgtaggtatccaaggaaccatatgcaacgtaatcaaacgatgcagccgcatccacaaagcgtttgtaataaccttctttaatcgatatcttctttttatgactgcgaaccagagttacatttacctgaatatcaaaggagtctgcatctggaaactcaaaatttccaacaagtcctttggaatggatatctttggtgcgaaataaaaaatactggcctttttccttcacatgtgccatgttgttgtaagaacaatagcccctgtcaccgataaaaacatcttttgtaccagtcagtaaatcgtggcggtcgaccatttcacagaaagcactaaattcatctttctgatggatcggctggatcagcgcatcggaataagtgtgcttctgtaagtcgtaaaaagcattcagatgcatactgtaaaagccctttattgaatgtccttcagagacatgatactcttctggggcgaaagcaggtttactgaaaaaggtaaaggtggagccatctgcagcaagaaagcggtagcgtagctttttttggtcataaaaagaagcaaaatggttaaaatgccgaaatacagcttccagggcatccgggctaagctttgcgcgttgctggttgagtgccgaagcagttggcgactgtggatccatgtcgaagaagtccagcaattcattttttgtgctggaggagccttgggaaacaaggaaagtgataagcttatcggcggggaacttcctgttccttgtcagatcggtgtccgaataggtaaattcggagattacggatgaaacaagatggacggaatgggaaaagcattgtttaattttttgatggaacattgtgtgtacctccttgaattagaatgaatttatgattctaatccaagggccgctctcgctacctattaaagtcaatcagtagcgagagcggccgcacattttgtggtgtatgtcaactgtttttatgaaaaaagggaaaaatatggttagacacccttcattaagaatctaaccataatattgcaaagcgttaactaaatgacattgctcttgaaactctaaccctaagtttataggaaaatatcgaaaaaatcactacacgttcttatttgacgcttactttctttatcagagaaatttcctcctactcgattagcgttagtgtggctccgctctgtgtgcgccggcattgtcgtgcctgggtaaacaaatgtatttataaaaatatgttaacataaaaaaaataatgttggcaaattaagaaagatgttgacaaaaataatactatatactataatcataatcgaaaggagtaaataattatgagctcattatcggcccctttacaaaggtccttagttgcaaaagacgttctttccacgcttcgctatgagatactcactggcgaactgaaggaaggcgaatatctccgcgaggttgctatcagtaagcgcatggatgtcagccgcggcccggtgcgcagggctcttcagcagctggaggcggagggattggttgcctgcgaggaaaacggcagaacgagagtgattggcatctcagacaaggatatcgacgatatctatgaactgcgtcttattctggaaaagaaggcgatctccatcctgcagaataaggacatcatggattacgctccgattctggacagccttaatcagttaaagctggagagagacaagggagaagaatgtgctcctgtgaaaatggcggcgctgggttacgacgtacatgtggcgattatgaaatgttctggaaataaggcgatatttaacgcctggaaatctctgtcctccatattacagcttattatggagataaacggtaattatgtggatgaagaatgggcctttaacagccataaaacgctggttgacgcgatcgtacagaaacggccggacctggagcaggtaattgaacagcatatgctggaggattcaaaaaatatttatttaaacgagttacaagtaaacggggcacatgatggataaccgtgcaatacatatataagcgaatccatgtgcaccctggatcattgggaggtacattatgaggctaaagaacttaaaacgttgggcggcatgcgctgcggcaatatgcgtagcggcaacgacagtagggtgtggcagcctttcagtgccggagagcacggcttctcaggcggaggctgcagaggaggcaggaaaagaaagcgagacttccgctgaactgacagaagcggagaagacagtccgggttgtgggaaatttgaacggcctctctctggatatgggaaacgcattttgcgattccttagaagagcagtccggtggtaagatcgcagtggagcggtacttaaccggccaggtggggaccaacgacgaggatctatgtatcggtctgtccgagggaaactttgacgtgtatctgacttccgatatgctggcgacctgggtgcttccggagtggcttggctacgccaatgtggctttctgcttccgagacgcggaccatgtgaaaaagtattggaagatgcttaaggaagagcagggtttaaatgataaaatgatcgagcagtacggcgtgcacgcaatcatcaccgattccgtggctgtccgcactcccagatatatcaccgcaaataaagagatcaagagcccggacgacatggtaggcttaaagttccgtacccccagtgtggagggcgtagttgcttcttggcaggcctgcggtgcttctattgtaccgattccctttggcgagctgttcagtgctctgcagacaggggcggcggacgcacaggaaaaccccaccgacatgatcatgcaaggcggtttctacagcgttcagaaatacatgatgctcaccagccatcagtacggcgcgtatttgttccacgtaaatgagaaatggtatgaaacgctgacagacgaagaaaaagagcttgtgataaatgcggctcagagcggttacgacctgttcaatgaaaagggagccgagcaggacgtgcagtatattaaggagctggaagagaagggaatgaccgttataccggcggaccagatcgatattgaggcgtttaaaggaaagatcatcgaacaggtattggaaaaattcaaagattcctgggcagaaggcggctgggaagtcattcagggattataaaagcagagtttacaggggcgccgcggctatagcgtccctttttacatctataaggagaatacacagtgaaatatattacaaattttttggataaatttatttttgcgctggcttgtgtcttgacggcggtgttgcttagcatggttctggttcaaatgctgtgccgcaatctgttcaatttctcttttacacaggtggaagaatactgcgttctgatgatggcgtggctcacattccttgcggcggcttatgcggtgcgtcactgcggccatgtggcggtagactttctctttcagaaaatggcgcgcccagtaaaatatgttctgaatctggtcacgattatgggtcttttgttccttaccctctacatgacctgctacggttatgggctttccatgcgccagatgaagacgccccttcctatcactcacattcccagaggctgcatgtatctggcggtaccggtgtgcagcgttatcatggccctgttttttctggacgcgcttattaactgcatacggaaaaagagtatcgagggcgtggtggttgacaccgacgaacagattgatcaggaactggaaagcggcaagaagctgatggaagaggttcttggaaatgacgggaagggaggaaggcagtgatgcaggtaggaattcttattatcgtgctgtttctcgtactgctgctgctccgcgtgccggcggccttttgtatgctgatcactacgctggtctacgctttggtggagcagtccgttccgcagtcctttatcccgcaagccatggtaagcggctccgcttcctatactattatggcggctccgttcttcatcctagtgggagagctgatgaacagttcgggaatcacgaaaaggctgtttaaatttgccaacgtacttgttggccatatcaccggcggcttggggcatgtaaatgtactagccagcgtatttttttccggagtaagcggatcggcgatcgcggacgcggctggtctgggcaatgttgagattaaggccatggtagacgagggctacgaccccgatttttcagtgggcattactgcggcttcctctacgatcgggcctatcattccgcccagcagtcccatggtactgtatggaattatgagcggaacgtccatcggcgcactgtttatggcagggattcccacgggtattctaatggccggatttatgatgttggtggtctatattatttccaaaaagcgcaattaccctaagagcaggagggctacgctgccggagatctggaaggcctttaaagaagccttctgggcgctgttgtccccgctgattcttatcgtaggtatgctatctggcttcgctacgccgacggaaactgctgctgtagcggccgcatactccttgtttttgggtgttgtgatctacaaggagatgacctggcaaagcctcatggacatcatgcgaaattctatcaagagtatcggcatggtcatgctgcttattgctaccggaaccgtgtttgcctggatgattggcacggagaaggtggcggaaaagagcgcagagcttttatttagcctgacgagcaacccgtatctgattctgctccttatcaacctgttcctgctgtttgtgggaaccttcatggagaccacttcggcgctgctggtgacgttgccggtgctgcttcctattgtaaagattatcggtatgagtaccgtgcagtttggagttattatggtgctgctcttgatgattggaatgctgacgccgcccatggcgctgtgtctgtttgtgacgtcgaaaataggaggcatttcctttgacagggcgtttaaggctgtgctgccctactatgtggcactgttaacggttttgattatcattaatctgttccctggcgtgacgttagcgctcacagggctgtaaggagggaaatacgctgctatggcttcaaatattaaattactgggctgccagttaaataccattgacccggagacgttgatctatttccagcagcttggaatcacggatattcagtacaacacgccggacattcccggagagaagacctgggcgtttgaggatatcaaagcatataaggagaaaacggaatcctacggggtcaaactggtctgcattgaaaatgtgccaatccggttttatgacaaggtaatgctgggacttccggggcgcgacgagcagatagagaattacatcgggctgatccgcagcttcggaaagctaggaatcacttatttcggatatcattttactccgaccttcgtgtggcgcacctcctatgaggcgaaaaccagaggaggggcgagggtttccgcttataatgatgaggcggcgaggcgggacggaaaccgcgtggcttacgccgcccggctggacgtggagattcccgatcctgaagatatgtggaagaaccatgaatattttatgaaggcgatcctgccggaggctgaaaaggccggcgtgaagatggcgcttcatcctgacgatccgccggtggcctgtgtatcgggtgtggccaggatctttaacagcttcgagagctatgtccgcgcagacagggagaccaacagtccggcctggggcgttgatttgtgtctaggctgctgctcggagatgggcggcgccccggtggtagagcgatttatcgactatttcggccataggggaaagattttctacgttcatttccgggatgtgctgggcgtgccggatgattttagggaatgctatctgggcgaaggaaactataacccggcgagggtgatgagaaagttgaaggaatccggctttaagggctatgtctgcgaggatcacgttcccatcatggaaagtgattccaaattcggccaccgcgcgcgggcctatgagatcggcaagctgcagggacttatcagcatgatggattacgatgacgaaaaataaatacggggataagcgagagaggcatttcgagtgcgatgtctctctttgtttgtgcgccatgggcgcactctaacaggtgaaagtcgtgtgttctgcaagctgtcaacagcttgccagtgaacaggattcagtgaggaggaaagccatgctggaaagattgaaaaaacagttgttttcagaggatgggatgaaagtggtcaatatcctgtttattcttttgtatctggtcagaaatcccctttttaccatatgtgcttacacggtatggtttgtttatttggtatattctgtcaggaatacaaaaagtaaggggatgaagatattttattcagtattaagtgtgttcgcgatgatattagtactgcttaatgcttattttacattcatatagttgggagctatgagtaaggcggcgaaatacaggaatttaggcgtttaaagcacactcgaaaatcgaaagtctgagaggaatattttgttaaaacgtataagatttaccaagtggattcatttacaaaggacagatttcatggcaatcctgccggcgtaattcctgatgcaaagggactgacagaggagcagatgcagagaatcgccagagaattaaataattcggaaacagcttttatttttgaagcagattctacggattatgatgtagaagtacggttttttgcacccacaacagaagttcctatatgcagtcatgccacgatagcggcccattatgtccgggccaaagagaaaaatttagaatgcggaacagttgtccaaaaaacaaaagcagacttattgcccgtggatgttgtccgagacgaaaacgactactcaatcataatgacgcagggaacacctgcggtatctgcgcctgctggggatactgtaagaaatcggattgcggacgctttgggaatcgctcgtgaggagatttgcagggaatatcccgttgcgattgcttccaccgggcattccaaggttatggttcctctttattcaaatgagctgcttcacggacttcagccggatttgcaaaagctgacggagattagcaaacaaattgagtgtaacgggtattatgcctttacactcaatccgcagaaaataattttggtccacggaaggatgtttgccccggcgattgggattgcggaggaccctgtaacaggaaattcaaacggcccgctgggcgcttatttagtacattataatattttgcaggatgccgatgaaccgtgcctcgactttgatattttgcagggggaagctgtcaaacgcgatggcacaatacatgttcatgttgaaaaagagcacggagcgccgaagttggttcaaattacggggaatgctgtaactgccttttcaacggagattaccatttaaatatatgataaagaactgaatttcctattattggataattcagcttcgccctattgggatgttattatgacaattgaaggcaatagttggtaaataaaatatggaggtaatcattttagataaagcaacttttcttttccggatatttgagttatgataaaagcaagattcttaaagggagaggaaaaagcgttgctatgggttctgataaaaaaagtattataataataggatgcggtgtactagggtcaattattgcagatggtattaatgataaactggtgaagcactatgagatatccgcggtttatgacaggcagcagttccaggcagagaagctggcagaacggctgggggtcaaaagggcgttgtatcttgaagaaatcattgcatataaacctgcttatgtcatagaagcagcctcaaaagaggttgtggaaagcatggcctgtgatattcttaaggcaggcattgatatgatcattctttctgtggggcattggcggatggcagactgatggaaagaataaatcaggcgggttctgaatcagaggcaaagctttatgtggccagtggagccataggcggctttgatcttatgagggcagtgcgttttggcggacttggagatgccgaaatacataccacaaagaatcctcattctcttaatggagctccctatcttgatggaaaggaattaccggaacatcaggaacaattggtctttaagggcagttcaagggaagcaatcgcaggatttcctaagaatgtaaatgttgcggtctccatggcattagcaacccttggagtcgatgagacaagagtcaaaatcagcagttgtccagggttggaaacaaatattcatgatatcaggcttaatggagattttggaacaattgagattaaggtggctgtaaaacctagtgagaagaatgctaaatcgtcaaccttagctgcgtggagcgttttggctttactggagaaaatgtcgcagacgattatgctgtgatgaattaaagtatgaatattaaaattggatggcagaggattgcagagatcctctgctatattttattgcataaacatttattttaaacaaacataaaatatttgttgaaatattaaaataatattgtaattatatagataatagtgtataataaaatcagaaacaagaggtgtaatgattttaagtaaaagggggtttatgatggaacagaaaattcaactgcttacaaagcaggcaccgccaccggctggaccttattcccagggaatagaaaccgaacaattcgtctttgtatcaggacagagaccggttgatccagttactggagaaatgaaaaatggaatcaagtctcagacagaacaggttattaagaatgtagagtgtgttctaaaggaagcgggatgtacactggccgatatagtcaggtcaacggtatatttgtccgatatatcttattttgatgatatgaacgaggtgtatcgtgccatgatatcggaaccgttccctgccagatctacatttggtgttcagctcagggggatattagtggagattgatgtgatagcaaaaaagacagaaaattgaaagtaggatgatacgttgaaggaaatcagtgaattattaccggcattggatgttttaatccgaggattaggaaagcattttggggaatcagtagagtttgtagtacatgattataaaaaggatttcgcccgcacgatcgtggccatctccaatggcaatgttacaaaaagagaggtgggcgacagcggcacgtccattggattaaaaatcatgcatggtgaggaggcggatgagggaaagtttgggtatatctcccagacaaaggatgggcgttatttaaaatccagtaccatatatattaaagacgagcagggtaaaatattaggttctctctgtgtgaactgcgatattacagatgctatgatagccagaaatttccttaatagctatgtgggatcaggagaggacgagaaggtggaggctactgtctacaataatgtggatgatttgctgatatcgttgataaatgaatccattaattatgttggggctccggttgctgtaatgaaccgggagcagaagattgatggtattcgatatttgaataataagggggcatttaaaataaaaaatgccagcacgattgtgtcaaaatactatgatgtgtcaaggtatacaatttataactatatcaatgatgggcaaaacctgaatgataccagtgaatgattaaggaggaaggcagatgctgaataggaaactgatagagagtgagttttctttcctgggcgaggatatttttttaaatgtttcttcggttgtaatgccgccaataagggttcagaaagcatatgaatcttttatgcaggattatatcgccaattatggcgatgatattgttccgaaagcatgggacatggtttcggatacgcgtaaaaaggtggcgcaactgattcatgcggtggattcccttgaggttgcttttgtaaagaacacctgtgaaggtgtatccatattggcagaaggctatccgtttaaagaaggggataatgtgatagtcgcagaccaggagcatcaagcgaatttgtttccgtggatcaacctgcaccaacgtaaaaacgtggacctccatgtggtgaagagcagagacggggaaatcaacgcagatgatatgattgcagcgattgatgaaaacacaaaaatacttacagtgtctgcagtgcagttcagcacaggattttttgcagatttacataagctgggtgcagcatgcaaggagaagaacgtgatatttatggtagatggtattcaggctttggggagattggatatagatgtacaggccatgaatattgactggttggttgcaggcaccaataaaggccttctgggaacactgggagccggaatcgtttattgcactaaccggattgtaaaagacatcatacctccctatgcatcataccaaagcgttataagccatgtggctccgccggccataactaccaattttgactttctggaatggcaccccaatgccagacgctttgaatccgggaatttaagttataactgtattaacgcaattaacaaggggattgagctgatactggagctgggaatcaagaacattgatgaatatgtcaggcagctggagatgtatttgcgaaagcaactggaagatttggaccttcacgttgtgcaggcagaagataaaaagaattggggaggggtggtatgtgtctattatccatcccacgctgacgaggaagtgatttccatattaaggagacataagattcactgcactatgagaggagggtatattcggttaggtattgacttttacaacacacaggaacagatggataaagtatctgcagcgttgcatgaggttgacagaatcaacagataggaggggatctgtatgagtatgatggaaaagtataggaagattccgcttttgacgaaactgttagttgctatggtaataggtattattttgggggctgtttttggagagaaaattaatgtcataaagcccttgggcacagtatttttaaatcttttaaaaatggctgcattacccctgattgtggtaaatcttatttccggtatttcatccctggacgatccgaagatttttggtagagtagggattaaaataatgttttattactgtatcaccacggttgttgctattgttttaggtctgcttctgggaactgtactgcagccgggcaagggctttgtgctgcaaggaacatatgaccaggcaattgagaccataccttctttcggagataccatagtggggctgattccgtctaatatttttgcatctcttacaaatggtaagtttgaccagattgtggtgttcagtgcctttgtgggtgtggccatgctgttcgtaaaaaaggaggacagagtggttctgaaaagcggtgtagacagtcttgcgaatctgtttaataaactggttggaataattatgggctatgcgcctatcggtatctgcgctttaatggcctgtacagttggtacctatggcgcacagctgggaggattccttgccaaatacctcggtgcatcctatgtgtgtgttgattcaaatagcagtatatggcgttttacttacagtttttggaaagtgtaatccattttggtttcttaaaaaggcatccccttaaatgataacagctctcggaaccagctccagccttgcatgtgtaccggttggaatagaatgtgcggacagcatgaatgttcctaaatccatatcgggctttaccattcctcttggttcccaggtgaataaagacggaaatggtatgatgctggcaatcacatttctgtttgcggcgcaggccattggcgcacctgtgaccatggatatgctgataaaggcaatactgatatccctcatcctcacaaccggagccggcggtgtaccgggaggagggattgtaacaatagctattgttatagacgcatttggacttcctcttgaggtggtaggtattatttccggtatttttgctttgattgacatggtgtataccatgatgaactgtttgggcgatttggtaggaacctacatagtggctcatcttgagagtaaggattaaagcaaacatataaacctgagtaaaaagggcgggagagcaagactcaaccgtcctttttgccgggttaaggtaagagcgtttgttatgatggcaggcatttatgatgtctgcttatccccgttctccggagggcagcacagcgcctggtgtgctgcaatggtggttaacgtatcccccaattgcatgaatatggaactgataagggcgatttcttcagggcttttaccttctgcaatgcagcaggcaagagtggatatggaaagggcaagttcgcaggattgcaagacaaattacctccttgtagtcatttgattgtatggccgcggaaaggaaaattccggtacgcccgttgcatagggagcaatttcatattgctgataatatatgacaatttgtccgggccgcagaaagaactgactttgattaaaattatttctcagaagataggggtaatcttcaaagtaagctcccggggattcctttaagcgttctgcaatttgctgttctatggctgtttgaagcccggtcagggcggcgggagtaaggggagaaatatcatccaggtgtaactgtctgccggagctgaaatcccaggtgtccgatgtccgtttcagctcctggtgggcgccgcccatgtaggtgtaggtatccatataaagactggtaatgcagccggaattataggttatatgataagtcatatccagggtgtagcggttaaagggcggataattggccgggatatatctggcactctcaaccgcctgggggtagaggacggtacggcaatactgttctgtagtctttgcaagctgcatataataggtgtttgctgtttgggcagcagctaaaacacaggtggtggagaaagatggataagtaatgtgataggtaaaaaccggtatgttcctataaaacatggagtcgtttaaggttagttctgtgattgtctgcatattggttcctgatttaaggagttataatagtatattcataaagcttccctgcatgacagtgtgaaacagaaaacgcggtatgcgtaatggaatggttattttgcataaaacaggggacatgtgggcaataaaatctatagtggctttacggactgaattttggtataatatagaaggtttatatataaaaatcttatgctctataaaacaatgagagtttggaaacatatggaggtagtacgattgtctacaagttattatatttttaaccggaaaaagcgggaagaaatccaggaatttaacagattctgggaggagacattcattccaggattaaaacagcagatagaggcttattgcggtgaacgaaatggaacctatgtcaacccggattttggaaatgaaataatcaatgaaaagatatccgggatttcggacgcgccaggtaaatccgagagctatgaaatggtaataggtgtgtcgcactggaacggcaaacggaacctgttccaatgggagggatcctatgttgaggaacatattatccgtgacgaggccagcctggtggaattttttaacagtaaaatgaaccagcagcaatacagcatcgcggatgaatttgataaagagtatacacttgatgcgttcctgaatgccataaaatatggaggggatgaatctgcttcctgatgatataaatatacagatatgttttacatttatgcggatacgtgaaaggcggatccgcattttatgattattttaaacacggaaatcagaaggaaaatctgattgaggaaagaatacgggggaaacaaatgttcgggtttcgtttgacaacattagttgtgtttgatatactttgtgtatcgaacaaatgtttggaggcggcgcgatgtcaagaagcagagactatgcagtcagatgtcctaaatgtggttctattatgccatttgaattatttgacagtattacatcatccttgaatccggagcttaggcagcagattctggacgaccggtttgaaacagtagtatgccctgattgtaaggctgtgtcatacatacagtatgatattttgtatcacgatcctgccagaaggtttatggtatgtgtggggactgattattcggatgtatttcagcagtctgattgtccggcaggatataagctaagatatgtggatgattataagcagctggcggagaagatacggatttttgaggcagggctgaatgatggaatcatggagataacaaaggaggccatgcgccacatggcaaagaggaatctggagttatattatgcgggcagccggagaaagctgatgttttttaccgttccggggcaggagaagcatgtagctgtatcacagggcctgtatacgctggccgggaaatattatgacaggattcccatggaggaagaccgaggatttctgcggattaatcagaagtatgcggaggcgttgaagaagatagaggtatgatgatataatcagagtatcaggatggtttgagtagaaaggagggcgtgggatccagcggcatcatgaatatatatggaagcagctccctgtacggggaggacatatgttgcggataaggatgagcagaaggcaatggaagtattagtggggatgagtctgatgcaggacagatgagtgtaggaaagagcggctgataccgtccatccatctattgccagagacatagatttgtgatagaatccttatgggataaaatcaagatatgcactgcggcaggcagggcggaatggagaagacgaatgaaagcatttgattgcgttaacaagcaggaagttgaagttactaaggaaggtttgattgacttcatgaaaaaggaccgccagattgatatgaagtttgcggagaagagaacagatgatatgggatatcttacctgggacgcagaaaactggacctgcgtggacggacagaacaagttcatgcgctgttattcactggagggccgtgtgctgagggactccaccagccacaatatttacgatatggaaaatgacttttttccggagcaggccatggagattcagatcaactaagtatttaaaaagacagccgaacgctgtctttttttaaacctctattatgaaccgcattgagcggccaatcttcaaccggggatgggatgtacgtgttattgcccctgtaaagaggagcggccagcgggctgttcccgctggctgagtattatgaaaaaaagttattagcattgcccttctacaatgattagtatattcaaaaaatgtgagcagtctgttgcaaaaatatgaacggtttgtaataagtttatgaatgaaataagaatgtacatattgcacaaaaaccggaaaggattattgaataaaaaagccaatagactaaaaaagttttaggatatataattaattttgtattaaatattggtgctattcactatgtatatcctgagaattggctcagagtttctaccaactaccgtaaagagttgactacatggctttttgtagttggctctttttttgcagttaaagatcggctggcggaggggggtaagtgtggtaaagcagctggagaccggctacaagggatagcgacgtgaggaatctaatcacattacacagattaaaacatgacatggaggacatagcattgaaacaagaaacaggacgtatagaccgatttttccaggtatctcagaaccattcaagcgtcaggactgaagtgcttgcaggaatcaccacttttataaccattgcctatattctgattttgaatccgcagattttagcagacccctacgtcatcatgggggatgctgccatggcagggaaaattgcaaatggcgtatttatcggcacatgtattggagctttcatcggaacgatcctctgtgctttgtatgccagagtgccctttgcgcaggcgcccggaatgggattaaacgcattttttgcatacacggttgtgctgggaatgggctacacatatggccaggccctggtggttgtgtttatctcaggcgtattcttcattgtgataacggccatcggactgcgcgaggctatcataaggtccatacccgacgcggtaaagacagccatcacccccggaatcggattgttcatcaccatcatcggtctgaaaaatgcaggtattgtcatttcaaatccagccacccttgtaagcctggtggacttttctcaatggaaaatagaaggggctgacctggctcttatgagcagcgctctggtcgcgctggccggactggtcatcatgggaacgcttcatgccagaaaaattaagggttccattcttctgggtatcgtggctgccacgctcataggaatacctctgggagtgacccatatttcaaacctggatatgaatatcggaatgaaattcagggatttcgcagaggtatcatttgtgaaaatggactttgccggattattttctggggccaatatggtggagaccatctttacagtaaccatgctggtcatcagcttttcacttgtgaacatgtttgattccatcggcacacttctgggcgctgccaagcagtcgggcatgattgatgaaaatggcgaggtaatcaggatgaagcaggctctgatgtcggatgccatttctacggctgccggtgccatggtgggaacatccacggtaaccactgtggtggaatccagcgccggcattgcggccggaggaaggactggacttacaagcctggtaacagcccttttgtttttgggagccattctgtttgcgcctattgtaagtattgttcctgcggcagccactgcgccggcgttgatttttgtgggcatcttaatgctgggaaatatcagggatgtggattttagtgatatgagcaacgcccttcccgctttctgcaccattgtattcatgccgtttacatattcaatcgccaatggcgttgcgttcggattgattacgtattgcctgatgaagcttaccactggcaggagacaggatgtgaaggtgctgacactggctatttcagtagtgttcgtggtgaggtatgcatttatgacgctgggataaacagcggcttgatgggaaggggaggaaaaaccggactacaaaatcagagaaagttgtggtaaaatacagataacccttggaccatatggtgaaatggtcctgaaaagggaggagccagtgggatatatcccactggccgagtattatgaaaaaaagtcttataagcattagctgtttacaatataaagtatatccactaattatgagcggtttgttgcctaaatatgaacagtttgtaagtagtttatgacgaaaatcatgcaaaattcttacaggaaaaaaacacgaaaacatgcggggcaggaggaatatagatgtggagcagattgaaacaatttctgggagtcattccggatttcccggattttgacgaggtaatccgtgccttgcatggtgacgtggtcaaaaggaatttcctttttcacatacttattattatgtttgaatgtgtgatggttatttccatatccatgcggccgggcgggccctttgccaaaccccgcagagtgacatattttgttctgtacctggtccttatactggcagcagcaggcgtcacatggctggaaacatggattgacaggaagaagcaggcggattaccgcctgtattttagggcagaggctgtatttcttgggtttttcagcctgtggggggtggccgttactctcaatgaccagctgggagggaatggacttactgtttataattatgttgttttgattctagcaatcatgtccatgatgaagccttggcaggcggcgcttttgtttctggcggactttatattgctcaatggcctgcttccctgttttccggatccggccggtttggataacagcttcaataacctgatgaacagcctgtttccaaccctggccgcggcggccgttgcagccagcctgtataactctaaattgcaggccaaacgaaatgaaatcattatccgcagacagtaccggcagattgaagccgccaatcagatgctgagccgtgaggctctatcagatgccctgacaaatcttggaaacagaaaccgttttaaaaagacaattcaggcttttgaatttgataagcaggggtgcgggactcttggctgtatttatattgatgtaaacggactgcatgagattaacaatcacctggggcatcaggcaggagaccagatgcttaaaaccatatcggacatcttccaggagtattttgattcccaggatatttttcgtattggaggagatgagtttgttattctgtgtaaaaatgtgggacgcggggacctggagcacaggacagagcaggtccgcaggcggacggaggaggctggctttttcctctccacaggactggaatggcgggagtctgctcttgacattgaggacgtgatccaaaaggcagagagagccatgcaggagaataagaggggcttttactcttctaaggggggagaacggcagaagcgtgaactgaaccagtatatggaacggcttatatcagagaaaaaggacgcggaccggtttctcagcattctggctcctgtgtttgagggtgtgttctttgtgaatctggagacggatacagtgcggcagatctttataccttcctattttcaggaaatgctggaggaatgtggtgacaaatatagcggggccctgctgctgtatgcagacagaatggtggaaccccaatatgcttcgttatttgagctctgctgtgattacagccgccttgaagctatgctggagggagatgagatacctgattttacataccggaaaaaggatgggagccggctgaggctgagaatcctcaaattttatcactatgacagcgcaggcaaggaaaccttatggattttttccgatatagaaatcaattacattgaactatgatggctgtgccataatgcaggggcgctgcaatgaaacaaataatattcattgcagcgctcctgagcaatgctcagtccatggttagaaagagaatgtctgaagctggaaattggagcctgagccaaccagggcaactgtgtagtcctgattctgctggaagctcatccaggtatccaccagaggcgagcgcatgtcgttgccccggtagaccgtaatgcggtagcgcccgggaataacattgtatatgcgggagtaattcaaaaagtttagattggacaccaccaggcggttgttcacgtagatctgaatcggtccgcggaccgcagcattgtagaatctgacgcgggcgggagagagaggaagaacaatgcctggcaggattgtaccccagttccaggaccagtctgggcgtacgggcggaacgggtcttggcggggtgggtctgggcggaacgggcctgttaggccgtccgggtctgtcgggcataggaggaaccggcctgtcaggccgtccgggtctgtcaggaagcggggcaaccggcctgtcgggcatagggcgcctgggcattgcctgcatgggactggcagccctgtcctgcatgtcaaaatcattctcctggtctgaccagtcgcttccatcttccggaagaggaagaatgggggtggtttcctgggagtttagccattcatcgggggtgtaaggctcagaatcatattcggaatatgcagcggctgaagtgatgtcatcctctgccatggacggatagtaattatcgttatacataaggtaacctttcataatatgctttgccatatcatatgcgtggaaaaagattatgtgcggagaggcttgattttcggaatacaaggacatgtttcatcatcatctggcaggaggaacacaaaatgcacaaaataaagtttccttctgacaaaactttgggcagacttttttgttcccctatgctattataatagacgtaaccccccaatacattatatagtttttgctacaccccataagaaacgaaataccttctcctaaaatgaccagttccccgactggtcattttaattgtatctgacgctgcatattcatgcagttttatccgattgtcacggaaatgaatcccgctttcaaataaattaaaaagtgcacaaaaaagagaaacgtatcaaagtttattttttaggaaaaaatggtgtgtgttttgctggcagtgacaatgatggcgggatgcgtcttgaggggaagcggcaatgcgcagaggggaagcggcagctctggggccgcgggcaaagaggcggaagagccaatgcgcctgctgccggaaatggcgaaagaagccaggccattatctgccaggcagtggatgccaagcagacagagccgattgtgaaggcatgcaaggaggcgtgggtgcctcttattgcctttaaccgtgtgtttgaaaacagtgacggctttgtggtacggcagcttaaaggtctttgccctggctctctgcgaggccatggagcagggaaaacggtacctgcttcgcacagcggcctccctggtaaaggtaatgggaggaatctcaatatgtgatatttccgggaaatgtaggggaggatgccgcccttagggagacagtggagatattgctggggcggtaagcgaataagatgtatagaatataatggaaaatgggatgtaccgtatgtctgtggctgcggtaccagcccttttttcgtctgccagcggacgcgggtgtctgcctgccggatacgggactattgacttccggggaaatctggtctactatttaaatggaatttcagattagacttgagattaggagagactggttcatgaataagaaagaagcaaatgaaatcaagaaattgtttacgcctgcgggctgcgccatcacccgtatctgcggctgctatgtggactcggagaaaaataaaaagacggagcttaaggaggcattcctctctcttcaggaagaagaggcctttaaatattttaccattttcagaaacgccctttccgggaccgtcggaaagaacctgattaatatggagtttcctttacatacggaggcagagggcggtacccagaattttctcttaaagctcagggacagccagttaaaggatgacgccatactggaggagttctatgacaaggtcatcgcggcctatgactatggcgaaaattattatatcatccttatccactgtgcctacgatatcccggccaaggcaacggacggcactgagatgtttgacgcgtcggattatgtatacgaatttatacagtgcaccatctgtcccgtcaagctttctaaagccggactgtgctacaacagccttacaaataccattgaaaaccgcgacagggactggctggtggaagcgcctgtccagggctttctgtttcctgcctttaacgacaggaatacggatatacacagccttttgtactatgccaagaacccggaggagctgccggataccctgatcgacgagctgttgggctgcgtgattcccatgtctgccaagagccagaaggagacatttcaggccattgtggaggagacactgggtgaaaactgcgattttgagacagtgaagaacatccatgagaacctgagcgagctggtggaggagacaaaggacgagccggtcccgctgaccctggacaagtatcaggtgaagaagctgttagagaccaacggcgcctcccctgagaagctggaggagtttgaacagagatatgcagaagtggaggagggccccggcaccagctttgtggcagccaatgtggtcaacaccaggagctttgaaatcaagaccccggacgtgagcattaaggtatccccggacaagacatatctggtggagaaccgcatgattgatggacggccctgtattgtcatagccatcaatgaacatgtggagatcaatggaatcacggtacgtcccgtagctgcgccgaaaacggatgacggcgaagatgaaaatgcccaggtgcccttttagaacgtgtccggatatatatggacagagacaggaaaagcagtgaagaagcaatgaaaaagcaatgaaaaagccgtcccgtatacccagtcattgtatggggcggcttttggatgctgcggccatcagatgcgctctgcattatcacgcatgaatttgaattccgccacggagcggtcaaaggtctggatgtggtagtacagccagtccctgactttttcggaaaccttttccacgaatgcgtctgtggggccttcttcctctgtcagcatctcgtgaagctcctggacagttcttttcagttcctcgtgcttttccttatgttctttgatacctggataatttatggattgctggagggcttcctcttcattaaaatggtactcggtataatccgcaaggaagtttaacatcctggccgcgccgctctggttggagcgctcctcgcagctctttaatagatcgttgatcttgctaatcagttccctgtgctgggtatcaatcatctcatttcctgttaccagatcgtctgtaaattctgcgtacatattccaatacctcctgaatgtttgatatatataatgagtgttcgatatatataatttatcacagatagtgagaaaatactatgacttttgcaacaaaaaggacaaattactgaattcgtaggagaatttattataattgaaaccagttcggctatatcttcgactctccgaatacacttaatgtaggggtgggtatacatgtaagaagttgtctggacaaaaaagtcaatagttgatataatgactatatacgcgtggcaatcataagataatgggaggatgaagatacagatgagtcggacaattagtgcaggttatgtatatcgtcaatattctacagaaggtgtttatattgcagattataaaagctccagggccgcccatgaggcgacaggggtttccattggttccatcgcaagagctgcccacggtgaacgcaggacaggcggcggttatgtctggagaaaggtactggcagattcgccgaaggatagtattgaaatagatttaatcagcaaaataggaaaccatgataagcgtccgctggtccagaagaatctggacggggaaatcgttggggaattcctctccattgcccatgccagccggagtcttaaaatcagccgcagaagcctgtcatgtgccctcagcggagctcagaagacagcgggaggctacatatgggaagagaagatggaggatgatattcaggttcaggaacagtagggcattagaccgcggtttttaatagaagaaattgacacaggaaacaggataaaaagcagtccgggtatttgggctgttttttgtttttgccggtattgctccggtatgttcggaaagtctgtaaataaaagaaaaaaccgcagaaatttgattatatttgcaagatatttctggaaatttgcatgagtttatagtacaataatgaataagaggagttgtatccctaagacagaggctcctgggattgggtaccatccatgcggacagcagcgacaagactatgaaggtctttgacatcagcaatataagaaactgtgaggatgtgaaggagcagctgtccggtctggtggagcaggaaagggataataagagggtatcatccagagagttcataggaggatacggggacggtgagaacgatggatttgacgagcgggacagtcattattagagcgtaatccatgttatattattattaagaaaggggactttgtatggggaaaaaacggaatatcatagtgggacagtcggggggacctacctcagtcattaattccagcctggcaggggtctataagacggcgaaggagaggggattccacaaagtatacggcatgcttcacggcattgagggactgttggatgagatgtatgtggacctgtccacccagatccattcggatatggatattgagctcctaaagaggactccgtctgcattcttaggttcctgccggtataagctgccggatattcatgagaacccggcattttatgagaagatatttgccatactggataagctggatattgaggtctttatctatatcggaggcaatgactccatggataccatcaagaagctgtccgattatgccattgtcaagggacatggccagaagttcttaggcgttccaaaaaccattgacaatgacctggctctcacggaccatacgcctggtttcggaagcgcggcaaagtacatagccacctccaccaaggaggtgatccgggatgccatgggcttatcctaccgccgcaagaccatcaccatcatggagtgcatgggaaggaacgccggatggctcaccggctccacggccctggctaagacagaggactgctgcggaccggatttgatttatctgcctgagataccctttgacatcgagaaattcctcaagaaatgtaaggaactgattcagaagaagccgtccattgtcattgcggtatctgagggaatcagggtgccggacgggcggtatgtgtgccagctgtccgggggaagcgattatgtggacgcctttggacacaagcagctggccgggacagcggattatctggccggtttcctggctggtgagctggggtgcaagaccaggtccgtggaactctccaccctgcagaggagcgcttcccatgtggcctcaagggtggatatcaacgaggcattcatggtaggaggcgcggccgtcaaggcggcggatgagggagatacgggcaagatggtggtcattgaccgggtttccgacgacccctatatgagcgcggccggcatatatgacgtgcacaaaattgccaataatgaaaagacggtgcccaggagctgggtcaacaaggacggaagctatgtgacccaggaatttgtcagttatgtggagcctttaatccagggagattaccagccatttatggtaaacggccttccgcagcaccttgttcttaagcggtaggaagcggagggggcctatattttctatgaaacagttaaaaatcacataaaaaatacctgccacaacggaaaagaatcagggcggttcccagaaaaatggggaaccgcccttaagttttgataaaggaaaagcgtccgaaaggcaaataatggaataattgcacaacgaaagcttgtattttttcatgtacaaggcatgaaaggaaatttgacaattgaatataatagtgatatatatatttcaaccacttttaattggtatctgttggacggttccttcctgtaacctgacaggacagggatgtctcaaaaaaggagttttgactatgaaagaaaagaaaatcatgttaccgacaatggctgaggcaaaaaggttcgttgatgaggctacaaagtgtgactttgatattgatgtattctataaccgtgtaaccattgatgcaaagtccattcttggagtgctgagcttagacctgacccggattctaaccgttcagtttaacggcgaaaaccagggatttgaggagtatctggaaaccgtttctcctgaagccaatgcaagcgctgcctgatgaggcgcggattaagaggcggattgcgaacacctgtttgcaatccgcctctttttatgttatgataccctatattatatatggaatggacaggggaggaagaaagagttggggaatcattcacagcctcagatacgcatttcggtgcggaatctggtggagtttgtaatgagaagcggggatctggacaaccggaggacggcaggggccaagaaggaggccatgcaggccggcagcaggctgcaccggaagattcagaaacgtatgggagcctcctaccgttccgaggtgatgttgcggtatcaggtgcaggaggacatgttcgatatcctggtggagggaagggcggacggaatcatcaccgagcctgccggagttaccattgatgagattaagtgtatctatatggatgtatccaggctggaagaaccggaaccggtccatttggcccaggccctgtgctacggctggttttacagcatccaaaatgaactggattccgtcggcatccagattacctactgtaatatagagacagaggaaatccgtcgttttaaggaggtcagaagctttgaggagctgaaatcatggtttgaggggctgattcatgagtatgtcaaatgggccagatacctgtatcaccacgggatacgccgccaggagtgcttaaaggagctgccctttccttatccctacagggaaggacagaaggagctggctgggaatgtgtaccgatccattgccagaaagcgcaacctgttcatccaggcgcctaccggagtggggaaaaccctgtccaccatctaccccagtctgaaggccatgggtgagggccatggcgagaagctgttttacctgaccgccaagaccattaccaggagcgtggcggaggaagcattctccattttaaggcgggagggacatctctattttaatacagttaccatcacagccaaggaaaagctctgcgtcatggaaaagccggactgcaatccccaggcatgtcccagggccaagggccattacgaccgggtcaatgacgctgtctatgaaatcatccaggaggtggacggcatcaccagggacaaggtgctggaatatgcccagagatatcagatatgtccctttgaattctgtctggatatcagcaactgggtggacggcatcatatgcgattacaattatgtatttgaccccaatgtaagactgaaacggtattttgaccagggggagccgggccagggctacctgtttctggtggatgaggcccataacctggtgcccagggccagggagatgtacagcgccagcctcataaaggaggatgtgctactgacaaaacgtattttaaagacacagaccggatcgggaaaggtcattgcccagctggataagtgcaaccagaggttcctggaattaaagcgttcctacggcgtggatgagggcgggcgcaggacggttctgggaagcacctacgagctgctgccggatgtgaatgccctggccctgaatctgatgaccatgttcggggaactggaaacctttatgaatgagaatatagagtttccggacagggacctggtgctggagttctactttgcggtccgggatttcctgtatgtgtatgacaggctggacgaacattacaggatatatgaccagattctcacggacggcagctttatggtaaagcttctgtgcatcaacccggccgcgaatctgaaggaatgcctggacaagggcgtcagcaccctgtttttctcagccacccttcttcccatccagtactataaggaacttttaagcggtaaccaggaggaatacgctgtctacgcaaagtcaccctttccccaggaaaaccgcatggtgctggctgccagtgatgtcagcagccgctacagccgcagggggccttccgagtatgagaagattgtggactatatatgccgggtcgtggaaggaaaaaaggggaattatatggtattctgtccctcttaccagtatctccacgccatagaggatattctggctgccagggaggcgtcaggggccctttcttttatctggaatgcccagacaaaccatatgacggaggaggacagggaggcgtttctgcaaagctttgaggaggaacgggattgttccatggcagcgctgtgcgtcatgggagggattttttcagagggaatcgacttaaaagaagagcgccttatcggcgctgtgatcattggaaccggactgccccaggtgaacacggagcaggagattctaaaggaatatttcgatgagcaaggggaacatggctttgactatgcgtaccagtatccgggaatgaacaaggtgatgcaggcagccgggcgggttatcaggaccatccgcgacaggggaatcatcgctctgttagacgaccggttccttcgcccggaatacgtggccctgtttccgagggaatgggggacctacaccgtggtcaaccgctacaacgtggaccaggccgtgagggcgttttgggacggaacaaaatagcggtcttttaaacgtccgcttcctataacatatccatgaactgtctggctgcctgggatacgggaaggctttcattgtatgccaccatcatctggcgggagggaagctgttccttcaaatccaggataaacagctcctcatcattttgggggatacagaaatcagggacaaaggcgattccaaggccgatgcgggccaggtcgatgagcaggtcgttgctggacaattcgatttccggcaccaggtccagctggcttttctggaatacctgatgaagaaactcgctggtggtgctcttgcggtccagcatcatgatgggataacgcagcagctcctccagggacattctggaaccctccaggggaaaggcgctgcggctggccacgaacacatcgtggaattcattgataactctggtattcatgctgccggccagggcggaattgggatagtttgcaacgataaagtcggcctgtccgttttccaggaactttgcacattcaatggaagtctggttgatgaccttgatatggatgtttgggaattccttgtggaaacggttcagataggggaccagatagtagcggcagatggtgtcgctggctccgatgcgcagctgtccgccgtttagggtatgggcctccagcagctggttttctccttttttaatgagattcatggcaggttcaatatgttttaagagaatctccccttccggggtgagctgtactttcttggtgctccggataaacaggggctggttaagctttttctccaggactttaatggactggcttacggcagactgggagataaagagctgcttggaagcctcggaaaagctcagcgttaccgccacatgataaaataccttataaagttcatagttaatatccattattaagtcctccttataaactaagcatatcttatcacgattgccggggctttgtaaagagggaaacttgacttatggtttgctttggattatcctattaaggattatgaatggaacatgaaattctggaaaattgaaaggatagagacaagatggaacacgatttttttgatatgtatctggaagagatgggagacattacaccgcttgacagggatgaaatgaattccgtccttgagggaacagccaggggcgacgcaggggcccgcagccgcctggtggaggggtgcctgagggaggtgcttgagatggtacgggaatacggggacagcgagctgcccttatccgatttggtccaggaggccaatacggccctgatgctggccgccatagagtacgatggcagcgaaccctggaatgaactcatgacccgccgcgtgaaggaaagtgtggaactggccctggaggagcagaggacagagaaccagattgaggagaccatggcagccagggtcaatgtgctccagaccgtgtcccaggttctggcgaaggagttaggcagggaggcgaccctggaggagctttccgctaaaatgaagatgactgaggatgaggtgaaggacatcatgaagctggccctggatgccctgaccgtcaatggggaaggccaggcagcggcttcgggccgggatgaggaagaacgccccaatcctgtgaggaatggctggaatctggaggaaggcctgtagggcgcaggacgcaggaggtaaaaacagatgaaactctatatcatacgccatggacagactgactggaacgtagagggaaagatacagggcaggcaggatatccccttaaacgcagccggccgcagccaggctgagatgctggcaaagggaatggaaaaacgtccggtgaccgccatatactccagcccccagatacgggccatggagacggcagagacccttgccagggcccaggggatggcggttatacccgtgccggaactggcggagatcggatacggcgactgggagggaaggactgcatcggatatattggcaaaggaacgaaagctgtacgaagaatggtggcagcatccggccacagtggcgcctccgggcggggagacgctgaaccaggtggatgtcaggtgtaaaaaagcatgggagcggataaagggggagatgaaaggggacacggctgtggtggcccacgggggaacgctggcccattttattgtccatctcctggaaggacagccggacgcggcggaaatcctggtgggaaatgccagcatcaccaccatagaatatgacccggttaccggacagtgcagtctggaggggttaaatgactgcagccatttaatgtgaaaatattgacataatttttagaggaacactttccgaaacacttgcgttccatgggggaatatattaaaataagagcagctatgtaagcgcttacaatcttaaaaggaggtatttctatgacagaggtaagaggtaatgtaatcgtagggcagtccgggggccccaccgcggtgattaattccagcctggccggcgtgtttaaaacagccaaggacaggggagctaagaaggtatacggcatgctccatggcatacagggacttctgcaggagcggtatgtggatttggaggagcatatcaagtcagatctggatattgagcttttgaagagaactccctccgcgtatctgggttcctgccgcttcaagctgccggagatatgtgacgaccgggatatatatgataagatattctccatcctggacaagctggaggttgagtatttcttctatatcggcggcaacgattccatggataccatcaagaagctttctgactattccctgctaaacggcagtaagattcgcttcatgggcgtacctaagaccattgacaatgacctggcggcaacggaccatacccccggatacggcagcgcggccaaatatatcggcgccatcacaaaggaggtcatccgggacggcctggtatatgaccagcagaacgtgaccatcctggaaatcatgggacggaacgccggatggctgacaggggcagctgccctggcaaagggagaggactgtgaggggccggacatgctgtttcttccggaggtgacctttgacgtggattccttcatgaagaaggtggaggagctccataagaagaaagcatcggtggtggcggccgtatccgagggagtgaagctggcggacggccggtatgtgtgcgagctgacagacggcattgagttcgtggacgccttcgggcataagcagctcaccggcacggccagatttctggcagagaaaatcaaccgggaagtgggatgcaagacaagggccattgagtttaattcccttcagcgctgcgcctcccatatcgtgtcaagggtggatattacggaagccttccaggtaggaggagctgccgtgaaggaggcctttgagggcgagacaggtaagatgatcattcttaagagggtgtccgacgacccttacgtctgcgtaacggatatttacgatgtacataaggtggccaatgtggagaaaaaggttcccagagagtggatcaatgaggcgggggattatgtgaccgaggaattcgtgaactatatccggcccctgattcaggcggaactgacaccgattatgacggatgggctgccccggcatttgtattatacggatgtggagaagaagtaaagattcaggcttttgacacaattaataccttactgtgatggtaaattttacattcccttcttatacttaatttgtcggcaagtgaatcggacaaattaaatgcaggaagggattttttatgaaaaagaaaaaagtgatttcatgtatcttggctgcagtcctggcagcaggcggacagcaggtgtgggcagccaccacccattacaatgactccagcgcaaccggcggctctgcggagtggaatgcctatgtggaggggtggaacagtctggcaaatgattatacccatgtatctataacaccgggtgcagcggattcccagctgaactttgcgtggtacaccgagggcgctgccgccacgccggtggtttactttggaactgacgccggaaacctgaagccttttaccggaagctcaggcagcgtggatacagagctgacagggggtaaggcatattcctttagttatgtgacggttaccggcctggaggagaataccacctactattattctgtaaataaaaacggggtgattacccagcctgagatgtacaggaccggaagctttgaaaatgtaaacatcctctatgtaggggatcctcagattggcgcctccaagggacagccccagggagaagggaagctggcagcggattcgggagcagccaacacggcggcccgcaatgacggatttgcctgggaccgcaccctggacattgccattgcgcagcaccctgatttgaatttcgttatttccgcaggggatcaggtgaacaagacaggaaaaccaaaagaggaggagtacgcagcctatctctctgccagtgctcttaaaaacctgtctgtggcaaccaccatcggcaaccacgattccctgaatccggattatgcctaccattttaacaatcccaacccaacgggactgggagctacccaggcaggaggagattactactatacctatggttccggcctctttatcgtattaaataccaataattacaatgtagctgaacatgagcagagcattaaaaaggcggttgagaatttcccggatgcagtgtggcgcgtggtaacaattcatcaggacatttacggttccggtctggaccattccgacacagacggtatgattctgcgcacacagcttacgcctgtgtttgacaggtatgacattgatgttgtgcttcaggggcatgaccatacatacagccgttccaagattctgtatggtgacggacagacccacaatgcctatgaattcaggttaaacggggccggggacgattatgactgggacaatgcttacaacacgggaagcggagaaaagattcctttatatcccggagcagaggatgctgccggaacagctgccctggaacagtttacaggcgacaatcactgttacacgatcgagagctcaggcgggaactctgtaaccaatcccaaaggaactctttacatgacagccaactcagcctcaggctccaagtactatgagctcatcagttcccagcaggattatatagccaacagaagccagaactggctgcccagctattctgttatcaatatgactccaagtgattttaagattaccacctatcagattacggacgatggaaaggtagagacaatcgacaacacatttacaatccataagacggtatcaggaagataggaaaaaagaatggtacagcttaaaaaacagtatgtgagatatatcattgcagccgtaatcctggcggctgcggtgctctgggtattccgtttgaacagtatcaccaggacacagcttattaaccgcaccggccagagttttgagaccggtgtggttgtccgcatattacaggacaatatacaggaggacggaatgcgcattggccagcagacggttgtggtgcgcatgacgagcggtgagaaaaagggagaggagctgaccactaccagcagtgcgggttatctgtttggagccgcgtgtactgtgggtatgagggtagtggtgatgcagagcatagccggcgattctgtgattaccagtgtctattccatggaccgcaaggaagtgataataggatttgccgtgctgtatctggggactctctgtgtcataggaggaaaaaaaggaatcaggggcgccctggggctggtgtttacatttgtggcgattatctatgtgtacctgcctctcgtatatcagggacactcgccttttatgtcggcagtctttatatgtgcggtaacagcggcggtcactctgtacctgataggaggggctgggaaaaagacggtgtgcgccacggccgggactttggcgggcgttgtgatagcaggggtggctgccgccatattttccagactttccggcattacgggatggaatgtgtcggatattgagagcctgcttaccctgtggcagaccaataatattcagttgggaggactgttgttttccggtcttctcatcagctctctgggcgcggtgatggatgtggccatgtccatttccagctccatgcaggagctctgcagccagaatccggagatatcccgcctggagcttatgagagcaggaatgcgggtgggccgcgatatgatgggaacagattccaataccctgatacttgcgtttgcgggaaccagtctgtccatgctggtgctggactacgcctatgagcttccctatctccagatcataaactccaataacatagggattgcggtgatgcaggggctgtccggcagctttggcgtggttttgaccgtgccggccacggtactgatggctgcatacatttataaaggtgaaaatggataatgaaaagcggactccgaagagtccgctgcctgttgttagtggtaaagcttcttatgctcatataccggctcagaggtgagctgcacacccagcttgctgaataccttaatatctacgtcggacaacatgacggaggtgtggacctggcagccccgaagtttaggaagctgtgccagggctttttttgcggtttcatcggtggctgcgctcatgctcagggcgataagtacctcgtcggtgtggagacgggggtttttgctgcccatgtatttggtctttaaggtctggatgggctcgatggccgacggcgcaatgaggtgtacattgtgcgggatgtctcccaggaccttgatagcgtttaacaggagagcggcagaggctcctaacaggctgctggtcttgcctgtgacgatggtgccgtcatctaattccatggccgcggcagggccgccggataccttggcccgctccagacagggagcgatgacagggcgcatggtggagtcgatttttgccttgttcatcagaaggttgattttgtagacttcgtcggaagtcccttcttcttttgccagacggttgagggcatggtagtagcgtcggatgatttcctgcttcgatgccccgcagcaggcttcgtcgtccatgatgcagaatccggccatgtttacacccatgtccgtgggagacttgtaggggctttctccgtatatgccttcaaagatggcgtttaatacagggaaaatgtctacatcccgattgtagttcaccgtggttacgccgtaggcttccaggtggtaggggtctatcatattcacatcgtttaaatcagcggtggccgcctcgtaggccaggtttaccggatgctttaaaggaaggttccagatggggaaggtctcgaatttggcgtatccggccttgatgccgcgcttgttctcgtggtagagctgggagagacaggtggccatcttcccgctgcccgggccgggagccgtgatgattaccaggggacgggtcgtctcgatgtaatcgttcttgccgtagccttcgtcgctgacaatgagaggcacattgctgggatagccttcgatgcagtaatggcggtacaccttgatattgcggtgctccagcttgaccttgaactggtcggcgccgctctggccgctgtactgggtgatgacaacgcttcccacatagagacccttgtccctgaattcctgaatcagacggaggacatcctcgtcgtaggtgatgcccaggtcatggcggaccttgttcttttcgatgtcagccgcattgatggcaatgaggatttcggcctggtcagccatttgaaggagcatacgaagcttgctgtccggcgcaaagccgggcaggactctggaggcatggtagtcgtcaaaaagcttgcctccgaattccagatacagcttatctccgaattccccaatacgctgtttgatgtgctctgactgcatggttagatacttttcattatcaaatccgattttcatttcttctgtaatctcccggttttttataatcacatacttttttagtatagcacaactttctggcctccgctacaaggagttttgaagggattgttgaaatatttataagtactgcatataacgatgattaaatatattaattttactaatttattatgtttgtgttatgataggagcagataaaaggacaaaggttctttttgcgttgtgttctaataaaaaggtcatgatgagagcaggaggttgctaaatgagcgtaagacgaatatttgtggagaagaagccagcttatgcagtaaaggcaggggagcttcgtgaagaactggaacattatctgggcatcagcaatgtgaagaatgtgcgggttttaatccgctatgatattgagaacctgtcagaggaaacctatcggaaggcgctggtgactattttctcagagccgccggtggacctggtttacgaggaagaatttaccaggaatccgggagacctggtattttccgtggaatacctgccgggacagtttgaccagagggcggattcggcagagcagtgcgtgaagcttcttaaggaggatgaggagccggttatccggtccgccaccacctatgtggtcaccgcgcccctgacagcagaacaggaggaggcgatcaagagcttctgcatcaatccggtggacagccgtcaggcggacgaggagaagccggagacactggtgacggaattcgaggctccggcggacatactgtattttgacggattcgcggattcttcagaggaggagttaaaggctctttacggcaccctgaacctggccatgacctttaaggatttcctccacatacagaactattataagaaggaagagcgcagggatccgtctgtgacggaaatccgtgtgctggatacctattggtcagaccactgccgccataccaccttttccacagagcttaagaatgtaaacttcacggacggcgattacagggagcccatggaggagacctataagcagtatctggctgaccgggaagtgatttataagggaagggacgataagtacgtgtgcctcatggacctggctcttatggctatgaagaagctgagaagcgagggtaagctggcggatatggaagtttccgatgaaatcaacgcctgcagcatcgtggtgcctgtagagattgacggggtgacagaagagtggctggtgaatttcaagaatgagacccacaaccatcccacagagattgagcctttcggcggcgccgccacctgtctgggcggagccatccgcgacccgctgtcagggcgtacctatgtgtaccaggccatgcgcgtcaccggcgcggctgaccccaccaggccccttggggagacgcttaagggcaagctgccccagagaaagatagtaaacagcgcggcacagggatactcctcctacggcaaccagatcggtctggcaaccggctatgtgaaggaaatctatcatcccggttatgttgcaaagagaatggaaatcggtgctgtcatgggcgctgctcccaggaaggatgttatccgcgagacctctgatccgggagatatcatcatccttttgggcgggcgtacgggccgggacggaatcggcggagccaccggttcatccaaggttcataccacttcctccattgaggtgtgcggagccgaggtgcagaagggaaacgcgcccacagagcgcaagattcagagaatgttccgcaggcctgaggtcagcagaatcatcaagaagtgcaatgatttcggcgcaggcggcgtatcggtagccatcggagagctggccgcgggccttaagattgatttggacaaggttcccaagaaatatgcgggcctggacggcacggagattgccatttccgagtcccaggagcgtatggcagtggtggtggatccaaaggatgtggaccagttccttgcatatgccgcagaggaaaacctggaggcagtgaccgtggcagtggtcacagaggagcccaggcttaagatggactggcgcggcaagaccattgtggacctgagcagggccttcctggacaccaacggggcgcatcaggaggcggacgtgaccctggaggttcctaaccgggcgggaaacctctttgataaggctgatgtggctgacgtcaggggaaaatggctgggcatgctttccgacctgaacgtgtgctcacagaaggggctggtggagcgttttgacggatccatcggtgcaggttccgtgttcatgccttacggcggcagataccagctgaccgagacccaggccatggtggcaaagcttcccgtgctgaaaggccataccgataccgttaccatgatgagctacggctttgatcccaggctttccagctggagcccgtaccacggcgcggtgtatgcagtggtttcctccgttgcaaagattgtggcggccggcggcgattacagcgggatccgcttcaccttccaggagtatttccgcaggatgaacgaaaatccatccaggtggagccagcccttctccgcccttctgggcgcctacagcgcgcagctgggctttggcctgccctccatcggcggaaaggacagcatgtccggaacctttgacacggaggacggtgaaatcaatgttccgcccaccctggtttcctttgccgtggatgtgaacagttataagaatgtgattacccctgagttcaagcgtccgggcagcaagattgccttgttccggattgcgaagaaccagtatgacctgccggactacagccaggttatggacgggtatggaaagatatttgaggacataaaggcagggcgcattatatccgcctatgccgtggagggcaatggccttgcggaggcagtgagcaagatggcattcggcaacaagctgggtgtgaagattgaacacaatgtggatccaagggatttctttgctgctgcatggggcgatatcgtatgcgaggtgccggaggtcatggtgggacagctgtccatatcctataccgttatcggtgaagtgactgacaggggtgcatttgagtacggcaatgtgtccattaccatggatgaggcattagacgcgtggatgactcctctggaggatgtgttcccaactgccgccggcagggaggcaaagggggaagaggctgcgctggaagaaaagctgtatcacagcggcgcggtgtatgtgtgcgaccataaaatcgggcagccgaccgtatttattccggtattcccgggaaccaactgcgagtatgacagcgccagggcctttgagcgggcaggcgccaaagtggttaccagggtgctgcgcaacatgagcgccgaggatatccgccagtccgtggaggaatacaaaaaggagattgcaaaggcccagatcgttatgttcccgggcggtttctcagcaggcgatgagccggagggctctgccaagttctttgccactgtgttccgcaatgcggtgatgaaggaggagatcgagaagctcttaggagagagagacggactgatgctgggcatctgcaacggcttccaggccctgattaagctgggccttctgccggagggtgaaatcaaggagcaggggccggaatcccccacccttgccatgaacaccattggccgccatgtctccaagatggtatataccaaggtggtatcggataaatccccatggctggccggcgccggactgggcagtgtatactgcaatcctgcatcccacggcgagggtcgttttgtggccaatgaatcatggctgcacagactttttgccaacggacaggtggcaacccagtatgtggatgaccagggcagatgcaccatggatgagtactggaatcccaatggatcctatatggccatagagggcatcaccagcccggacggacggattctgggcaagatggcccattccgagcgccggggcgaggcggtagccatgaatatttatggggagcaggatatgaagatatttgagtcgggtgtgaggtattttgaggtgtagatgtaacgcggacgcgcgtggggagccgcgtccgtgagagtcggggacgcagtccgggaggtggcagtttccgcagcgggaaatcatcaaattagttgattgagcgatgccctcgctttatctacacaaaaatccggagggaatctcttggctataagattctttccggatttttggcatactcatcttcaagcttttccgggtcgtccatttcaatcttccgcaaggctgggagcgccgcgaggaaccgactgcgccaggtggcaacattattataatgaagcccggcctgtggcgcaatattctggttgagttctccctgtgacgcaggcaggacaatgctggctcttttgaccagtcctgacggaagggagcggctttttgaaaaagcagataatatgtttttcatggcatcagataaaaccgggatagtatcaattgttttccttcgcataataacccatccattctttagtgatagaattattatgcaccgactactactataatacattgaaaaatggtctaatagcactggacacacttttccgaaaagggagttgtttttctgtggctgatggagccgtatactggttcctttaatatgatcataacaaaactgggatttggaaaatacccattcctctccagcctgaccacagccatgatctctcttgttctggttctggtatggaaaagcgatgggtattatgtacttcttgtaatggcggatcttcagactgtaccggtcagcatttatgaagctaaagagccgattcttcaaaattcagaaagtattccaaattaccggacatgacaatctccagtttggagtaatattttttctgagagattggtttaccatagcacatatattcaaacagcagactgcaggccagataagattgcgcctgcaggtcctgaaagatgacggcattgatcgtgcggtctttcaaatagggtacaattgccgggaaaagatccatgcccaccaatgttatatcggttcggttttcacgatgaaggacacgggaaatcgtgtccagacggtaggtaagatcataaatggcagtaggctgctcttctatgagaatccgcgtcaaatgttcatcgaccatgcaggaatctttcagatgtctgacgatcggaagaatccggacagatgggaaaaaatgattcatctgatccagaaatccacataggttattctgagtaaccgtcatattggaactggattcttctgcaacaaggatctggacacttccatttacaggctgcatctttcccagaacttcagcagctaactggccagccttataggcgtcgacaccgatgaatggataaaagggaatatcaggaacatctttgctgagcagaatcacggtgcaacctgcctctgccagttttatcagagcagtatgcatctgtgcaggatctgctgcagaaatgacaaaatgccggatgccggattgaaatgcttttttcagatccagaagctgctgtttgggctgatggattggagctgtataatgatggacttccagtccgtgatctccgtattcctgaatggcctgccggatcccctgctcgatcacgggggcaaaataggcagcatccggagattcaaagtcaataaaacctataatgtagtttttattcaatgcaagatttcttgcattgttattcggtacataatcataacgcttcagtgcatccagaacagtctgtctggtttgttcactgacggttcctttctgattcagaaccttgtaaattgtagttcttgatatgtggatctcttttgcgatatcttctagagtcagtctggaatgtgtttttttcatggtagttcttcctctaaatttctcgtaatttcaatttattataacacagatgttgtgaaaaatttataagcaattgacagattgataaaaagttgatattttatagttaacacgtgttaaataaaagaagaaggagaggtaatggtcaattgctttatcaggagggaaaaaaactttttcgtcggtttgacaaagagcttttgtgtattgaggcttatggagcagatggattccggatcagagcaacacagttaagaagttttcggagcaaaatcccgcggtttgatggcattcattttcctgctgtcccgcggtctgcagacggcagttgttctgtatgcgccggcacttgccctgtccctgatcacaggtacagatcctaaggcggcaattttgattatgggtgtgttctctattgtttataccgtgtttggcggaattgcagcagttatctggaccgatgtagcacagatgtttgtgatctggctgggtgtgatactggcaatactgattccgatatttaccgtggatggtggccttggaagcattatttcatatgcagtttccaataatatgatcgttggactggactttacgcctggtatcagtaatccatattcgttctggggcggtcttctgggttctggtttcctgtatctgacgtatctgggaaccgatcagagtcaggtgcagagagttctgaccgcaaaatctctgagggaaacaaaactttctttgtcgctggccggttttgtagtaccgattcagacgctgctgttcctgatctcaggtatctgtctgtttactgcatttggcggtcaggcatttgaaaattctgattatgtcatgctgactttcattacccagtatcttccggttggaatgggaggtctggtaaccgccggtgtgtttgctgcaggtatgtccagtgtggattctgctttgaatgctctggcaacggccagtgatgatcagtgtttaaaggtatcaaagcttatgaccctgttctggggcgtattcgctacggtgtttgcattgtttctcggcggacttggtacggttctggatctgattaatgtaatcggaccgatgttctatccatgtatgctcagtgcatttgccctggctgttttttgtaaaaaaggtaatgaaaaaggctgtattgcagctattattaccggcctggcagttgatctgtatatgtggaaatgtacttccatcggttctctgtggtggagctttttcgggttccttgtggcttttgcagttggatatgtggtcagtgtgttgacaaacaaagaaaaagatcgggaaatcaacgaagatttctgctatgaaactgccacaggcagtgatctgacaatcagcaatgtagtgaagctggcagttgcaggcaagattgcagagaaagatgaggatggctattatgtagttccgggtaaaattgataagatcggatatgcattgctcatattctttgtggttcagtgtgtgatcttggcatttatttagagaaaggcggattcttatgaacatggaatgtctgattcagaccaatggaattgctccgatggaaattctggcaaattttctgaaaacttttggggcagtgatgaaatacgggcatacgactctctatgaaggagactgttattacattccctattatatgatgacttatcaggtagaggaaactggagaaagctatgctttcctgaacagtcagctgagtgaagatatttccatgtttcccatgggaggaagcgtgtcattgaagttggaacagaaagaggtagatgcatgttttctgctgaatggggagaaagaagaatccgaagccagacagcagatccgaaagaagctgcagatgaacaggcagcttcggaagctgtattccagatatcacctgatggagcagtcctggaagaaggtttatatccaggaacagagtttctacgcgaaaggaaagagtgaatatctgtttctggtagatggatttctaggaaaagtggattttaaacatctgggggcagtagaacgaagatttgctgaaaattatataaaaaataaatgatggaaaaacgagaggggctgttgcaaaataaatgagtaatctatggagtagcagcttcttttttgcctaaaaacagaaaagcaggctccgaagaacctgccattcatggtataatttctaaggaaagtatcactttctaagcagtgaaaaagagcagttctcgaataagccagagctgctttgaaagtgattctttccaattgtaccaagttgcggaagtttagccagtgtttatatggagatagtactgtttcggtattgccgaaaatcgtatattcattctaaaatcaggtgaaaaccatggagattttgtttacttaaatgttttcgggcatacttctaagacctcccactgacaggtcttgaaaaaacaatataaaaatcaacagaattagattggtgcataacaccttccaagctgtctcatggaactgcgtccgcattccagttttccttcctcgtatagagaattcaggagagaatgatatattcctttgaacttatcgcgcaagacatacccagggataaaaaagtttttggacgattttcttatcttttgtacctttgttagaccgccgccagatacgatgcagtggatgcacatggtagtccagttcctgattccaggtatgaagaacctgaataatccccggtgttgctccgagatacttcttatccgaagataacttttaatacagcctgtccatgtttgctttgctccgggcgccctgcgccctgcgcaaccccggcttttcccgcccccatcccactcacggacggaaccacctatgcccctcaccatattcaaatcaccttttgataccccaccctcaaatcgcctgcttcgcttccctctgtgaggacaagcgtgccgcagcagatgtagccgctttttgccagggcgcgctgcatggcctgattgtcaggatgggtgtcgatgcggatattgcggacgcctgttttcaggacatactgttctgcttccgagaacagcctggcagccagtccgcggcctttcatggattcttccacacatatccggtggaatgcaaagtaaggctcctggttcagccaggctccgtctatggaggcatagctggcttccggtccggggacaatggtaatcatcccaacgacctgtcccgtgtcctcaagcacatgaagctgggaccggaggatggaagcctccattacctggcggttgggctcccccttctgccactggtcaatgttctttgctttaaatgattccttggcctggtccgacatggccacgagcctgtccaggtcttctgcggttgctaaaccaggggccgggccgctattgcattttaaattccggctgtttataattgtgatatcatatgatttcatacagaggaaaggagattaagcaagatgaaaacagcaatgacaagggagacggccttagaggccctgaaaaaatataataaggaaccgttccacatccttcacgcccttaccgtggaaggcgtgatgcgttggtttgcccaggaccagggatatggggaggaggaggatttttggggaatcgccggcctgctgcacgatattgactttgagatgtatccggagcagcactgcggcaaggcgccggagcttctgagggaagcaggggcggaggatgagctcatccatgccgtgtgcagccatggatatggtcttgtctcggatgtgaagccggagcaccagatggaaaagatactgtttgcttcggacgagcttacgggcctgattggggccgcggccaggatgcgtccgtctgggagcgtcatggacatggaggtgtccagtcttaagaagaagtttaaggacaagcgctttgctgccggatgttccagggatgtaatcagagaaggggccgagggactgggctggaacctggaggagcttatggacaagactatccgggccatgcgatcctgcgaagccgctgtcggtgaagagatgaaagcatacgaggcataacacctgactcactggcacctgcaccttctgcgaaaccatgagccggtgtatggacattccctgagaaaaggtccgccatagaaaaacaaatgtctcctgtacgcaaattttttcctttaaaagtattgacatacataacaaagtagggtattatttgcacttgtaacgccatacatataaagtggcatttattttatgaaatacgttccatatccggcgcatagaatgaaacaagggagatagacaagatgaaaaaagtggtgaagttcggcggaagttcattggccagtgcaagacagttcaagaaagtagcggatatcattaaatctgataagtccagaaggtatgtggtcccttccgcaccaggcaagcgaagcgataaggatgagaaggtgacggacctgctctatgcctgttacgacgcagtggcagaaggaaggtcctataagaaaatcctggaaaagattaagagcagatatatggatatcatcgacggcctggatttaaacctgaacctggaccacgagtttgacaggatagaggagaattttctggcaaaggcgggacgggattacgcagcttcccgcggggaatacttaaacggcatcgtggcagccaacttcctgggatttgaatttgtggatgcggcggaagtcatcttctttgacgaaaacggaaattttgagtcagagcacaccaaccgggagctgtctgagcgcctggagcatgtggagaaggctgtcatccctggtttttatggttcaaggccggacgggaccatcaaaacattttccagaggcggttcagatgtcaccggttccatcgtggccaaggccatccacgcagatatgtacgagaactggacggatgtgtctggtgttctggtgacagaccccagaatcgtggagaatccggaagtcattgagaccattacatacaaggaactgagggaactttcctacatgggagccagcgttcttcacgaggacgccattttcccggtgcgcaaggaaggtatccccatcaatatcaggaataccaaccggcctgaggacaagggaactctcattgtggagagtacctgccgcaagccgcgttacaccatcaccggaattgcgggcaaaaagggattctgctccattaacatagagaaggccatgatgaatgccgaggttgggtttgggagaaaggtgctcagtgtgtttgagcagtacggcatctcctttgagcacatgccctccggcatcgacaccatgaccgtctatgtgcaccagtcggaattcgaggagtttgaacagtccgtcatagccggcatccacagggctgtggagccggacaccgtggaactggagtcagatctggctctgattgcagtggtgggacggggcatgcgctccaccagaggaacagccggccgcatcttttcagccctggcccatgcaagggtcaatgtgaagatgatcgaccagggctccagtgagtggaacatcattatcggagtggagaacgatgattttgagacggcaatcagggccatctatgatatatttgtaaccacggaactgtaggcagtctggctattataccgtttgcaggaagcttcgcggggggatgattccccgcggggctttttctgaggtgaggcagagcgggccgtctgtgtcccggccgtctgtgcccgggctttcagtgttcaggcttctccgcccagccttccccggcctaatttttcattttattatagttgaaagtgtgatatactggataaaatagtaaacaggaagagaaggaggggaacatatgcttgaaaagattgatttaagtaaaaaagttgacaagaaaacttaccgcagggtcatggacgaggcggaggagaagctggggcttttgcagagggagtgtaaggatgcgggaattccggtcattctggtgttcgagggaatgggagctgccggcaagggagtgcagattaaccggctcatacaggcactggatcccaggggctttgatgtctatgcctgcgaccgccccacggaggacgagcagatgcggcccttcctgtggcgctactggacaaagacgcctgcaaagggcaggatcgctgtctttgaccgttcctggtaccgcagtgtccaggtggaccgttttgacggccttaccccggaggataagcttggggatgcgtaccaggatatcctgtccttcgagaaacagctgtgtgatgacggcactgtcatcatgaagtttttcctgtatatagacaaggatgagcagaagaagcgctttaagaagctggaggggtccaaggagacctcctggcgggtgacagacgaggactggaacaggaataaggatttcggccggtatctgaagatgaatgaggagatgctggagaaaacagatacagactatgcgccctgggtcatcatagaagcagtggacaaggattatgcagcccttaaaattgccagcacggttatggaccgcctggaatatgagctggagcatagcaggccggaagaagaaaaaacggcgcaggggcaggaagccaagatccgggagcggtttaagaacggcgtgctctccggcatcgacctctcaaagagccttacggaggaggagtataagacccgtctgaaaaagcttcagaagcgtctggcggagcttcacagcgaactttaccgtctcaggattccggtagtcatcggttttgagggatgggatgccggaggcaagggcggagccatcaaacgtctgaccagcaatctggacccaagaggatacagggtaaatccgacggcggcccccaatgacattgaaaaggtacaccactatctgtggcggttttggaacaatgtgccaaaggcaggccatatcgccgtctttgaccgcacctggtatggaagggtcatggtggagcggattgaaggattctgttcggaagcccagtggaggcgggcctaccaggaaatcaacgagatggaatcccatatggccaatgccggagcagtggttcttaaattctggctccacattgacaaggatgagcaggagcgcaggttcagggagcgccaggccaatcctgccaagcagtggaagattacggacgaggactggcgcaaccgtgagaaatgggaccagtatgaggaagcggtcaacgagatgctcatacgcacttccaccacctacgcaccatggattgtggtggagggaaatgacaaacgatatgccagggtaaaggtcctccagaccgtggtggatgccctggaaaagaaaataaaggaagtaaagacagacaaatgagtgagacgaaccatgtaattgtaattggcgcaggggcggccggcatgctggccgccatagctgcagccggtgaaggcgctgaggtggagctgtgggagcagaacgaaaagccgggcaaaaagctgtttatcacaggcaagggccggtgtaatgtgaccaatgcctgcgatatggaggagctgctcggctccgtggtaagcaattccaaattcctgtacagcagtttttacggttttacaaaccaggacatgatggatttgctggaacaggcagggcttcgcctgaaggtggagcggggcaaccgggtatttcctcagtccgacaagtcgtcagacgtcatcagcaccctgtccggccttatgagacaggcgggagtcaaggtgcgcctgaatcagaaggcggacggactggcggtggaggacggcgtgtgtaaaggcgtacggtacggcggcaggatacaggcagccgaccgcgtcatcgtggctaccggcggcctgtcctatcccaccaccggatccaccggggacggcctaaaatgggccctggacagcggccacagacttacggagctgtcgcccgctctggttccctttgaggtgaaggagacagagaccgttaaggagctgcagggcctctcgcttaaaaatgtggaggctgctgtatatgacggaaaaagagagctgtaccgggagtttggagaaatgctgttcacccatttcggggtaagcggacccgtactcttaagcgccagctccttctgcgccagggccataaggaagaagcacctgcgcctggtgattgatttgaagccggccttgtcatgggaacagctggacgagcgcatcctcagggacttttcagacagcaggaacaggcagtttaagaatgccctgaaccacctctatccggcaaagctgattccggttatcattgcccgcagcggcgtggacccggataagaaggtgaatgaggtcaccagggaggaacggcgcggactggcagaggcaaccaagtccctggagtttaccctaaccggactccgaggctataaggaagccatcataacccagggcggtatatccgtaaaggatgtaaatccctccaccatggagtcaaagaaagttcggggcctgtattttgcgggggagatattggatctggacgcggtgacaggcggctttaatcttcagattgcatggtccacgggctgggcggccggaaaggctgcggcgtcatagcgccggaaacacaagggcttcctggcacggcagaatacatgagtacaataaaattacatgaacacaggacaggagagaatgcaacacatggagtatttcaatattgccattgatggtccggcaggcgccggtaaaagcaccatcgcgaagctggctgctgaaaagctgggatttgtatatgtggatacgggagccatgtaccgttccatggccctgtattttatcaggcagggcatatcgccggaggatgaggaggctatagccagggcctgctctcaggtggaggtcgccatccgctatgcggacggagcccagcaggtcattttaaacggggaggatgtatcaggactgattcgttcagaggaagtgggacgcatggcgtccgccacgtctgtgtacgggcctgtcaggcagaaactggttcagctccagaagcagctggccagggaagcagatgtaatcatggacggacgggatatcggcacctgcgtgctgccggacgctccggctaagatttacctgaccgcctctgtggaaacccgcgccagacgtcgcttcagggaactggaggaaaggggggaggtctgcgatatcagggaaatcgagaaggatatagaggaaagggactaccgggacatgcaccgggagaactcgcctttaaggcaggcggaagacgcggtgctcctggattcctcccacatgaccatcggccaggtagtggattccatcatacgcatagccagggagcgggggtatgagagatagccatggacaggaaagtcacagtagcaaagagcgccggcttctgctttggcgtggaacgggcagtggaccaggtctatgaacagatcgaggccctgaagagcaaaaagacatccggtcccatctacacctacggccccattatccacaatgaggaagtggtaaaggatttgtcggataagggtgtcatggttctggagacagaggatgagctgagggcgcttcccaaaaaccagggaacggtcatcatccggtcccacggcgtcagcaggcatgtgtatgagatcctgaaggagcggaacgtggccgtggtggatgccacctgcccctttgtgaagaaaatacaccgaattgtggcggagcactccgcggccggggaggcagtggtaatcatcggaagcccggaccatcctgaggtggaaggaattaagggatgggggaatgaacatactacggttataaaggatggggagggggcggataactaccgtctgcccgagggccgaaagttatgtatcgtgtcccaaacgacatttaatcacaacaaatttaaagaattagttgaaaaaattttaaaaaagggttatgatagtagtgttttaaatacgatttgcaatgcaacacaggaaagacaagtggaggcagcaagaattgcttcgcaggtggacgctatgattgtgattggcggcaggcattcttccaacacccagaagctttacgagatatgcctcaaggagtgtaaagacaccttttacattcagacactcggcgatttagatcctgacagtgtatcttctgtgcgcagcgtaggtattacagctggggcatccaccccaagaaaaattattgaggaggttcataccagaatggcagagcagagttttgcagagttattaaaggaagaggaagaatcaaccaaaccaatacgtacaggagagatagtcaccggtcaggtcatcgaagtcagcaaagatgagataatactgagtattgcaggtaataagtccgagggagttatcacacgtgacgaatacagcaacgacagcaacgtggatttgaccacaaaagtacagattggcgaagagatggaggccaaggtcattaagcttaatgacggcgtaggcatggtttccttatcctataagcgtatggcagctgacagaggcaataagcgtctggaagaggcatttgagaaccaggaggttctgacagcaaaggtagcacaggtattagacggcggcttaagcgttgaggttgagggcgcaagggtatttatcccggccagccttgtatctgacagctacgagaaggatctgtccaggtatgcgggacaggatattgattttgttatcacagaattcaatcctaagagaagaagaatcatcggcgacaggaaacagcttctggttgcacagaaggcgaagctgaaagaagaactgttcgcaagaatccagccaggcgatacggttgacggaacagttaagaacgtaactgactttggcgcgtttattgatttgggcggcgcagacggacttcttcatatttccgagatgagctggggccgtgttgagaatcctaagaaggtattcagggcaggggatcaggtaagggtactgattaaggatatccagggagagaagattgccctgagccttaagttccctgaggctaatccatgggttaacgcagctgacaagtatgcggttggcaacgtggtatacggccgtgtggcacgcatgactgatttcggcgcgtttgttgagctggagccaggtgtggacgcactgcttcacgtatcccagatttccagggagcatgttgaaaagcctgctgatgttttaaggattggccaggagatcgaggctaaggtagtggactttaacgaggctgaccacaaaatcagcttaagcatcaaggctatgctggcgcctgcagcacaggacgctgacgtggctgacgtggacatcgatgccatgtcacagtacacagaagaataataagaattggattcatgaggactggttatgggctttggcccatagccagtttttaggtttgccgggagaagctacttcatggcagggttcagaagcagggatgcctcgaaaatcccgttactgtaatcgaatttcaatatgccgtgataccgttccaccagataccgcacagaggtggtgccggttcccatatcctcccgtttggatgagaggaaacgtccgtccttcatccgtatgtgatgggaataggtgttctgtatggaaagggcgatcatggattcgccggcctgaccgatgttgatggtgatggagggcgttccctgagtctgcctttgacatgcctccaccgcgttggagagaaggttgcccaggatggtgcagaagtctatctccgggacaggaaggctctgaggcagggagatggaggagttcaccgcgattccctgggtctgggcagtctgtatgtagtaattgagcagcgcattggaggaagggttctgacagtaccgggtggttttcagagtcgcgtaggagcccagatagtcattgatatactccagggcaaagtctgtctcctcctgctccaacagtcccttgattgtgatgagatgatggcggtaatcatggcgggccttcttgaattgttccagattatactggagcgtggccatctgggatttctgtacgctggccagcagccggatggtccggtactgctccttgaccgcgtagctttcagccagccgggacagaatcctcagactcacatagtggaccgtgtagatacaggcaaaccagcagacagcaaaaaaagccatgtcaggatggtgctggagcatgcgggaaggggacagggagcggattgccagccggaacatgatgaaaaagagcaccggaatggcagccagatagttccagaccggaagaagccttgtgtattccactgccttgttcagatatttgtgcagaatataataggctgcccagaccatgagaaacagaaaaataagattgcccagcaattcatccctggttataaggaaactgctctcataaagggagaccgaagcattggacaggtccgcgcagtacgcggcggtatccgtgaagttcttaaaaaggaaaagggaatagatgttcacaggccagtccgtccgcaccatccatttacagaccaatatgttggtcgtcatggtggtacaggcccacgccatctccagccagggccggttcaggaaatgccggaagcatgtcaagcccaataggcatacaaaaaacaggtatcccataagaatacctgcggtttttgacatggtataccgccactccccgcggaataccgccaaaaagggaacgatgatgaatatgattttagccaaaatcacacatatcagctgtatctgtgcaaagttcatcagatgcctccatttagtttggagaactggtaatctgcatactgctgatgaatctgcgaccgcatggtcctggtaataggcagatgttctccggttgtcaaaatgaactctgatttctccatggagaataccttgtccatgttgatgatgcaattccggtagcagcatataaactgggagtagataaggagcatgccggaaaactcttcaaaccgcatataagtgcggaccgtcttgtccggaagatggatttgtatgtagtggtttgaataatctgtgtaaaggatggagtcaatgggaatcttaagcataatgcggctttcctttacctctatataatgactctgcttcctgcgggacacagacataaaatactccatggtctgacagagcttctcatagcggatgggctttatcatgtaatccagggcccggacctcataacccttcagggcaaaatccgtactgctggtggtgaacacgatggtacagaaatcatcatccttacggaccctttcagcgattcggatgccggaagtctcattgcggagaaaaatatctatgaatataaggtcaaagctgcctctttgccagcagcgaaggaagtcggcggcggtattgaagatggtcgtctgctggcaggtatgtgtgtcagaacaataggcggatataaagccggctaactgacgagcctcatctatcgagtcgtcgatgactgcaatgttcacggtgcccttcctttctttcgtatatcaacagggtaacaaaagccatacaaattatcctgtgacggtacgctatgaaacaatccatataggttcagtataatatacaacaatttaaattgcaagggcaattggaataagttgtaagaacggtataggcaggcccctgcctgggtataatccatttgtacttattttgtatcagcaagaaaggagcaagaacctgcatgggaaagtctaaaaagaatgaggcatttgatccccataacctgagtgcccaggaccagcttaagtttgagattgcccaggaactggggctggacgcaaaggtcatggagggcggatggagaagcctgacagccaaggaaagcggcaagataggggggcttatcacaaagcgcaaacgggaacttaagaaagaggcattgcagcaggaatgattttccgatatactgttttatatctttaatcaggaatgatacaaaggagacgggaatgaagataggaatgatctgttttacggcgagaggcgccggaatatgccgcctgctgtgcggccggttcagggatacgggaactgagtgccggggatatgtgccgcggcgcttctggaagccggaatgggaggcggagggaatcctgcctcaggacaggtccctttcggaatggaccggatccatgtttggacagaagagggcgctggtattcatcggtgcagccggtattgcggtcagggccattgcgccctatgtccgggataagatgacagaccctcctgtggtggcggctgatgaggcgggacatttctgcattcccctgttgtcaggccatgtggggggagccaatgagctggctgaaagaatggcgggctggcttaatggcataccggtcataaccacggcaacagatgtcaacggtgtgtttgcagtggatgtcttcgcggcccgaaacggtctttgcatcacagacagaaaagaggccaaagagatttccgcctggctgctggatggcggggaggtgggctttttctgcgattcggagtgccatggggcggagggcgccagggacatatgcaggcataatatatgcatgaatagggtgtgcgggcataacatatggattacattccgaaacagtgaaagaccctccttcctccgcctggttccaaagatggttgtggtgggcgtgggctgcaggaagggaacacagccggatgtcctggaacgccgcgttctggaagcgctggaggacagcggtattgacccggcggcggtaaaggcactgtccaccattgatattaaggccggggaggcagctgtgtcgcaattggccggcaggtacgggtgggagctccgcacatttacagccggggaactgctggctgtaaaaggagagtttgaggaatccgagtttgtaagaaccgcggtgggcgtgggcaatgtctgcgaaaggtcctgcacagccgggggaggaatccttctgatacataagcgggccggagaaggagtgacggtggcggcggccatagagccggtcgcaagagccggtcacagccagtaacagccaatcacagccagtaacagccagtcacaggtaaattagacattgagaaatgcagtcggatatgatatacttttccatagtttaagtcagatgttggacagcgggtgagactatgggagattcgtacatctataagaatcagaaaaaattgagatggggatacaccacaggtacttgtgcggcagcggcttccttggcagctgccgttatgttgttgcagggcaggagaatggagcaggtatccctgacaacgccaaagggaatccgtttggacctggaggtggaggagatggatccgggtgaaaacagcgtatcctgcggcgtcagaaaggatgcaggcgacgacccggatgtgacggacgggcttatggtgtattcacagatccggctgccggatgcggacagcggcgatgctggctgtgccggtggggattatgtgtatgaaaaagacggattacggctgtatttatccggaggtgtgggagtgggaagggtaactcagtgcggtttgagctgtgaagtgggaaaggctgccattaacccggttcccaggaagatgatatttgaacaggtggccggtgtgtgccgggaatccggttttaaaggtgtgctttccattgaaatccgtgtaccgggagcgtttgaggtagcgcataggacatttaacagccgtctgggaatccggggaggcatatccatactggggaccagcggaatagtggagcccatgagcgagacagcgcttcttgacaccatacggctggagctgaggcagaggatccgcaagggggagaagaaccttttggtgacaccgggaaattacggtgagagctttgtgggcaatgtacttggacttggcctgggacaggctgtgaaatgcagcaacttcataggcagtaccattgacatggcggtggaagaaggggcggagtccatactgctcataggccatggcggtaagctgatcaaactggcagcaggtatcatgaatacccattcctcctgggcggacgggagaatggaaatcctggcagcccacggagctgcctgcggcgcaaaaagggagctggtggaacagattctggaagcagtgaccgtggacgaggggctgcgcctcctggagacagaggatggcctgcgtgaacaggtgatgaagcgggtgatggggcggctggaacagcatgtgaaacggcgggccggtgaaggtctgagggcagaggccattgtatttaccaatgaacgcggaatactgggcgcgaccaccggagcagatgatttgcttatgtactttacggacagaatgaggaacagatgaaaggcggaataagatgatacatatagtaggagcaggtccaggtgcggttgatttgattacggtcagggggcagagactcttgtcggaggcagatgtggttatatacgcgggttccctggtcagccgggagcttttggactgggccaggcaggatgccaggatttatgacagcgccaccatggacctggagcaggtcctggaagtgatggaacaggcggaacgggacggtcttaccacggtgcgccttcacaccggagatccctgcctctacggtgccatacgggaacagatggacggtctggacgccagggggataggatatgatatatgtcccggagtcagctccttctgcggagccgcggcggcgcttgggatggaatataccctgcccggcatcagccagagcgtagtcataaccaggatggccggaaggactcctgtgccggaccgggaatccatagggaaatttgccgcccacggcagcaccatggtgatattcctcagcgccggaatgacgggggaactgtcagaggagctgatgaagggcggatatccgggggatacgcccgcagccattgtatataaggcaacctggccggacgagaaggtggtccggtgtacgctagccgccttaaaggagacggcagacagggaaggaatccataaaaccgcgcttattgtggtgggaaataccgtgtcccagaccggctatgagcgatcaaagctttacgaccctgcctttaccaccggattccgtgtgggccgtgaagatgcccgggggaaacacaagcccggaacactctatgtggtgggaatgggaccaggagaaaaaaagcagatgacgggacaggccctggaagtgatggagcagtgccaggtcatagccggttacacggtctatgtggacctggtaaggggattgttcccccataaggaattcctgaccactgccatgaccagggaagaggaacggtgccggaaggcctttgattgctgtatggagggaaagaatacagccatgatatgcagcggggacgcaggggtttatggaatggcgggcctcatactggaactggcagagcagtatccaggtgtcagcgtcaggaccgtgccgggaatcaccgctgcctgcgcgggggcggcggttctgggagccccgctgatgcacgattttgccgtcataagcttaagcgaccggcttacgcccctggaagtcatatggaaccgggtggaggccgcggcccaggcggattttgtcatatgtctgtacaacccggccagcaggggacggcctgactatttccggcaggcatgcagccgtattctcaagtacaggccggggcataccgtgtgcgggctggctgtgaacatcggcagggaaggggaagggatggaggtccttgccctggaggacctgaaggaacgccgggtggacatgttcaccacggtttacatcggcaattcccataccaggcagattggcccctatatggtcacgccgagaggttaccggtatgaaggaaattaagaagaatatcgtactgtttgccgggaccacggaggggaggctgctggccgaataccttcaggagcttaaccagccctttgtaatctgtgtggctaccgggtatggaagggatttgctggaggatatatgcaggccggaccatgccggatgcatggagatacgccaggggcgtctggatgtcacggaaatggagcagatgtttgatgagctgcggccgggatttgtcattgacgccacccatccatatgcggtggaagtaacccgaaacataaggattgcctgttccggaagaaagggactgcggcttataaggtgcctgcgcgagccggggatcggggacagccggccgggggcgggggtagtccatatgccggatgtggagacggcagtcacatggctgtcctctgtgacgggaaatattctggtgacaacaggcagcaaggagctgagctcgtacacaaggataagggattatgagcagagaatttatgccagggtcctgccctcggaggaggccgtggcccggtgcaggagtctgggatttgagggccgccatatcatcgccatgcagggacctttttcagaggaaatgaatctggcacagctcagggaatacggatgcgcttatctggtgaccaaggacggcggcgcggccggaggcttttcggaaaagataaaggcagcgcgcagggccggcgctgcggcagtggtgattgaccggccgggcagcggggaaggcatatccttagatgagataaagggacagctgaaggagtggatggaccatgaaaagaaaggaagcatatatggatgatttaaggccaatcgtatatctggtgggcataggaatggggggagaggaccagctgacgggccgggcaatggattgcctggaggcggcccaggtggtgatgggtgcggaccggatgctggacagcgtcagcgcgtacaccgataagaagcggatattttcagcctataagccaagtgagatggttcagtggctgggcagcttccggtgggatgaggcagctctggtgctgtcgggagacaccggcttttacagcggggctgaggcggcggccaaggcatttgtgcgtgaaggatgggacgtggaatttgtgccgggtgtgtccagcctgtcctatttctgcgccaggctgggaaagagctggcagaatgtccatccggtcagcagccatggacgggactgcgatgtggttgcccatatccgcagctttaggagctgttttatcctgctgggcggagccggcagcgtgccggatttgtgccgtcagctggtcagcagcggaatgagcaacgtgaccatatgggccggagaaaatttttcatatgaggatgaacgcattgcctgggaaatgactcctgccgagcttctgatggaggatgagcgccttccctttggcagcctggcctgtgttctggtggagaatacagaggcggcggaaggacagctttatccccagcccggtcccggggatgacgactatatccgtgggcaggtgcctatgacaaaaaaggaggtacggaggatatccctggagaagctgtgtatcggcgcccaggccgtgtgctatgatatcggggccggcaccggctccgtggcggtagaaatgggaatggagattcgcaagcggggcggaagcggccaggtgtatgccattgagcggaaccggcaagccctgcagctgattgaatccaactgccagaagttccacggaagctggatgggatttcacattgtggaaggcgaagcgcctgaggccatggagggactggagccgcccacccacgcgttcatcggcggaagcggaggccatatgcgtgaaatcgtggcagcccttcttgacgccaatccccatgtgagaatcgtggccaatgccattacactggagacagtgggcgagattctggcatgtatgaaggaatttgaattcgccacaggagagataacccagatatgggcggctcctgtggatacggtgggaagctatcatatgccaaaggcgcagaacccggtatatgtggccgtcatgcaggacccaaaggacgacgggggagagatacaatggcaggagttatgatagcggctcctggaagcggaagcggcaagaccatggtaacctgcggcctgctgacccttcttaagagaaagggatataatccggctgcatttaagtgcggaccggactatattgacggcctgttccaccgcagggtgctgggagtggaaaatgaaaacctggacagtttctttgagaccgggacacatatgagacagaagctgtcccggaggatgaaagaccattttgtggtggcggaaggggtcatgggatattttgacggtctggggggcgtgtcccttcgggggagttcctttgagattggaaatattcttggacttccggctattctggtggtggatggaagaggagccagcttatcgctgatggctttgattcagggatttttggagtatgatgtgacggcggatgcaaaaaatgagaaaaaaactcgtgagaaaaaaacttgcgagaaaaaaactcgcaacataaggggcatctttttcaaccgtatgtcctccatgatatataaccgtctaaaacccatggtggaggaacggtttcagattccggtcataggatatctgcctgaactgaaattccttcaggtgggaagccgtcatctgggactggtgcttccggacgagatagatggaatcaggggacagctggaacagctggcagaccagatggatgacaatttggagtgggaatcgcttttgaggattgccgctgccgcggacggctgtgacagggaggcgccggtccggccggaggcaggaatggcaccacattttcgtctggggattgccagggatgaggctttttgtttttattatgaggataatctaagggctatggaacaggccggagccgagcttgtatattttagtccgctccatcagaaggaactgcctaagagactggacgggctgattctggggggaggttatcctgaaaaccatggggaggccctggcagccaacggaaccatgcgggattcggtggctgcagcagccggttccgggatgcccattctggcagagtgcggcggatacctctatctgctggaccgtctggagggggctgacggaacggattatcccatggcaggtgttttgaggggccatggatacagggccggaaaaaccggcaggtttggatacataaccctgcggcccaatcgcagccttccctttcttcaggagggggcagagataaaaggccatgaatttcattactgggactgcgggtgcggggaggatgaattttgcatgacggcggtcaagccaaacggcggccgttactggtcctgcatgagaacggtgaaacgggtgatggccggattcccccacctctattatccttcctgccccgaactggttcaaagctttgccggacagtgcgtggtatatggaaaggaacgagacaaggaataaggcaaggaataagatgaagaacaagacggaaaggaacatgagctatgacattgaaggaagcaatgaagagcattaagcccgccagccaggccctcaggcgtcaggcagagcggcgctgggaccaggtggccaagcctttgggaagcctgggagtcctggaggaggatatcatacgcatagccgccgcatccggcagcctggcagtcagcctgcaccccagggctattgtggtcatgtgcggggataacggcattgtaaaggaaggcgtgacccagaccggacaggaggttaccgccattgtggcagggaacatggctcagggaaattcatgtgtatgccttatggcccgtcaggcaggggctgacgtaattcctgtggatgtgggcatggcctgccgtgacgcggttcccggcgtggtgaaccggaaagtggcatatgggacaaaggatttcctggaggctcctgccatgaccagggaggaaacggtgaaggccatggaggcaggagcagatatggccgtggagctgaaagaaaggggctatgtgctggccggctccggagaaatgggaattggcaataccactaccagcagcgcccttctttccgtacttttggatgtggaccccgaacgggtgacgggccggggggccggtctgaccacggctggttacaaccgcaaggtgcaggtcataagggaaggaatccgcattcacaggccgtccggagaggatccggtggacgcgctgtccaaagtgggcggtttggatttggcggccctgaccggcttttacattggatgcgcggcctgcggcctgccggtggtgctggacggactcataacaggggcggccgctctggcagccgtccgaatcagcccggatgtaaaagagtatctgctggcctcccacgtttcagccgagcctgccgggacaatggtcctggatgcccttggccttaagcccgctatttccgcgggaatgtgtctgggggagggcaccggcgcagcggccctgcttccgcttttagatatggcggcgtctgtgtacacccggatgagcagctttgatgagatccatgtggatgcctatgagcatctggtgtgattgggattaacaggatatcatgaagataggagaccaaggatgattactctggtgacaggcggaagcggcagcggaaaatcagaatatgcagaagggcttattctggactcctcctgttcccgccgtttttatgtagctaccatgattgcatatggaaaagagggaagggataaggtggagcgccaccgtatgctccgacagggaaagggcttcatcaccatcgaaaagccccgggatgtgggaagggtgatgtttgaagaacatgaggccggttcaggcgcttcatcccgggcagaccgggctcttttgctggagtgcgtatccaacctggcggccaatgagatgtttaaggatgaggagacaggggaagcggaggcaggagagcagcagggcagtccgatccaatgcctgtcccataagattgcgggggacatcatttccctggccggacaggttcgggatatggtgattgttaccaatgaagtggaccgggatggaatctgttacggacctgaaacaatggagtatatccgtctcatgggctgtctgaatcagaagctggcatctgccgcggaccgggtggtggagttggttcacggcattcccgtgctctggaagcccatctcaggacaggcagcggttggggctgacttgacaagaagggagtgtcagggagaatgaacggactttattcctgtatcatagcagtttccatgtattccaagatacccatgcccaacgtggagtggaccggggagcgcatgcgctatgtcatgtgcttttttcctctggtggggcttgctcagggggcggtcctgggcctttggctccatcttgccctggatgtgctgaatctgtccgcggccgtttcggctctcgtgggggcagccgttcccctgctggtaaccggaggaattcatatggacggttttctggataccatggatgccgttcattcctatggtgacagaagcagaaagctggagatcctgaaagacccccatctgggagcttttgcggtcatttcctttggcgtttacatgatgctctatctgggggtttttcatgaatacctgtcccttgtcctgagggaggaaatgggggacagatattttctttatgcggttccctgccttgtgtttgtgatggagcgggccttcagcggcctttccgtggtcacatttccccaggccaaaaagcagggcctggcagccggatttggcggggcagcgaaaaaaaagacggatagcctggttctgcttctgtggatgcttatttgcctggtaacaggcgctgcagccgctcggatgggctgtcgcggggcggtggtactggcagtagtcctgcttatgacccacctggccgtgtttatatggtattacaggatgtctgtgaaacagtttggcggagtgacgggggatttggccggatgctttctgcaggtttgcgaactggccggtctgacggcggccacagtcctttttaaagcaggcttgatgggaggaatgtaggaatgattttagtaacagggggaagctcccagggaaagagggagttcgtcaggcagtacctggggggacaggatacagaacccgttgtttggacagagggcgcggaggcttcctgggaggaatttatggacggcaggttctgccgtgatttccagctctttgtcaggcgggtgatggagggcagcgtggtcccctgcggccatgaacctgaggggccggtcacggaacagcttctggaggagctgtttgccggaccagaggaccgtgttctggtgacagacgagacaggctgcggcatcgtgcccgcagatgcctttgaacgcctgtaccgggaggagacggggcggttgtgctgccggattgcaggggaggcggaggaagtgtggcgggtgtgctgcgggatagggatgcggattaaatgacgaggtaggtagacatggatatgacgtggctggatttatggaaatttcacggtgcggccctgctggcgggatgtgtgattgactggatcataggggatcctctgtggcttccccatccggtgcgccttatgggaaccatgattgccgggatggaacagcggctcggaagatggacagagggaacgggaaggaaagggcagtcccgggcagggactatccttgccgcctccatgtgtatgatatggtggtgtattccatgggcaatcgttcacgcggcggaacttctgtggcctgcctgggcctgggccgcacttctgctggcagaggggttcctatgcagtttcatgctggctgccaggggactgtatacagaaagcatgaaggtgtgccgcagcctggaggcaggccgcacagaggaggccagatacaacgtatccatgattgtgggaagggatacctcggtgctggatgagggcggaattgccagggcagcagtggagacagtggctgaaaatgcctctgacggtgtcattgccccccttttgtttatggctcttctgggaccggcaggaggcacgctgtacaaggctgtcaacaccatggattccatggtgggatacaaaaatgaaaggtacctgtatttcgggcgctgtgcagccaggctggacgacctgcttaatctggcgccggccaggctgaccggtatactgatggttttgggtgcatgggttttgccgggcatggacggggctcatgcctgcaaggtgttctttcgggacaggaaacgccatgccagccctaattctgcccacggtgaggctgcctgcgcaggcgcccttcatctgcgtctggccggggatgcctggtatttcggaacccttcataaaaagccgtatatcggggatgaccacaggaaaattgaaccgtcggacataaggcgtgcaaaccatctcatgttttttgcggaggggatgatggtctttgggctggctgtgatgattttgcttttgtgatatcggccggtgcgtgtttggaatgacagatgtaaaaaggacatacggaggttattatggaatatcaacacggcggggacatatacagccaggacatacagatggattattctgccaatatcaatccccttggcatgccggaggcggtcaggcaggctctgagggactgcctggagagggaagtctgcagcctgtacccggacagccggtgcaaaaagctgagacaggccctgggcaggcatcatggggtggaggaacaatggattatctgcggaaacggggcagctgatttgatattcggcctggcagccgcgctgcgccctgtgcgcgggctggtgacagccccggccttttccgagtatgagcaggcgctgaggtcggtgggatgcaggaccgactattattatctcaggtgggatgcgggatttgccctggatgcggcggggatgtgcggctgtgtccgggaggcggcagagagaggcgagccctacgatgtggtgttcctgtgcaatcccaacaatcccacaggaatacccgtgaaaaaggaagaggttgagcagctggcagatacctgtgagcgtctgggggcttatctggcagtggacgaatgcttctgcgatttcctggatgcttcggaatcatattccgtcatacccggcctggcccggtttaagcatctgtttgtgctgaaggcatttacaaagctgtacgccatggcagggctgcggctgggctacggcctgtgcagcgacgaaagcctgctggagcggctccgggcagtgcgccagccctggtccgtgtcggggccggcccagtgcgccggcgtggcggcccttggagagacggattttgtggagcacacgaaagaggtgattaagggggaacgggagaggctttcaggcgccctccatgacctgggctttcaggtatatccctcacaggccaattatctgttttttcgggaccggaaagaggacgggactctggagaaaggccgtctttaccaggaactgctgcgccgccgcatactgattcgcagctgtgccaattatccggggctggactcatccttttaccgtatctgtgttaaactgagacaggacaatgaacagcttatccgggaaatggcccgggtgcttgagaggaggaaaccatgtctgaacatacgaagccaataatgattcagggaaccatgtccaatgcgggaaagagcatcctggcagccggtctgtgccgtatttttcaccaggacggctacaggacagcgccctttaaatcccagaacatggcccttaattcctacataaccccggaagggctggagatgggacgggcccaggccgtacaggcggaggcggctggaattgttccccatgcggacatgaatcccattcttttaaaacctaccacagatgtgggaagccaggttatcgtccatgggatttccaggggcaatatgaaggccagggattatttcgcctgtaagaaatccctggtgccggatatcatggcctcctaccggcggctggaggaacagtacgatgtcatcgtcatagagggcgccggaagcccggccgagattaacctgaaatccgatgatatcgtgaacatgggcatggcggacatggcggacgccccggtgcttctggtgggggacattgacagaggcggtgtctttgcccagctctatggcacggtgtccctgctgacagaggaggagaggaagcgggtaaaaggattgatcatcaacaaattcagaggcgacaggtccatactggagcccggaatttccatgctggaggagctgtgccatataccggtggtgggagtgataccctacatggacgtggacatcgaggatgaggacagcctgagcagccggctggagacaggtaagagcaaagcccctgccgcggtggatttggcagtgattcgttttccgcgtatatcaaattttacggattttaatgtgttttcaggaatcccgggggtgtcgctgcgctatgtcacaaaggcctgtgaccttggcagccccgacatggttatccttcccggcaccaagaataccatccatgacttgctttggatgcgccagaacggtctggaggctgcaatccttaaactggcggaccgtcaggtgcctgtgtggggaatctgcggcggctaccagatgatgggagaggtgctggaggatgcaatgggggtggagtcagacctcccttcccggacagccggaatgggccttcttccccttaagacggagtttgaggaagaaaagataaggacccgggtggaaggcgcgttcggcgagttggacggctgtctttgcggactgtccggaaaatccattgagggatatgagattcatatgggccgcacgtacattgaccgggaagagggggccgcggacacggccagaatcgtttcctggcgcagggaaccggaaatatgccgccctttgggctatgtgatggagacgggaaaggacaggattttatccagacaggccaggatggatgggtggaacaggggaaatatctacggtacctatatccacggaatctttgacagcccccaaatagccaggacagtggcagaagccctggccgcggcagagggcctatgcctggaacaggcggcggatatggattaccgcgcttacagggaacagcagtatgataagctggcggaatcgctcagggaacatctggacatggatgccgtgtacagaatcatgggcatcagcccaaaagaaaaaggagaggagaagccggatgacggatatacagttggaacaggtattgccgggagatattgagaggcgcagttttgagctcatacaggaggaactgtccttacagggcatacatctgaagcctgaaaatgaaatggttatcaagagggccatccacaccacggcggattttgactatgcacaaaacctgatattttccggtcaggcagtgaaaaaggggatagatgccttaaaagccggcgctgtcattgtcacggataccaatatggggctgtccgggatcaataaaaaaaggctgtccgccctgggcggggaagccttctgtttcatggcagatgaggatgtggcgttacaggcaaaggaacagggcaccaccagggctgtggccagcatggaaaaggcggccaggctctatggtttgcaggagcgtccgctgatttttgccgtgggcaatgcgcccacggccctggtccgcatttatgagctcatagaggaaggtctggccgcccccgcccttgtcatcggcgttccggtgggattcgtgaatgtggtccagtcaaaggaactgattctgaccctggaggatacgccgtatattgtggcagggggaagaaaaggcggcagcaatgttgccgccgccatctgtaacgctctgttataccagattcccgtgtaaagtctttctatttccggccgctccagcagtaggtgcagagcttgcagggggagataccgatggatttcaccaggtcatccagcctgtggtaacgcagggtggtgaatcccaggcgcttgcggatttcctcaatcatctctttgtaattggcgctgtccgggtccgtgtaggtgttcagcacatcccgggacacatcgtcgccctccctgtcccgtatgatgcgtctggtaatcaggtccagctctgaggtggaacgggagaagttaagataggggcatccgaacataaggggagggcaggccggacgtatgtggacttcctttgcaccgctctggtacaggaattccgttgtctcacccagctgggtgccccgcacgatggagtcgtcgatgagcagcagcttctttccgcggatcagagcgtccacaggaatcagcttcatgcgggcgatcaggtttctctgtccctggttctggggcatgaaggagcgcggccaggtgggggtgtatttgatgaagggacgggcaaatggaatgccggattcattggcatacccgatggcgtgggcgatgcctgagtcaggaacgcccgcaaccacttcgggctgcgcgtcatccctctttgccagcagctttccgcactcgtagcgcatgctctccacattaatgccctcgtagctggatgtgggatagccgtagtatacccacaggaaggagcatatcttcatttcttccctgggagggctgaccgtctccgcgctctcaggcgtcatatatacgatctcgccgggccccagttctttgtagtccgtatatcccagattgatgtaagcaaagctttcaaaggaggcgcagtaggcgtcctccttgcgcccgatgacaatgggggtccttccgaatttatccctggacgcatagattccttccggggtcagtaacaggatggacatggagccctctattttttcctgggcataaagaagcccctccaccaaggtggatttctggttgataagggcagccaccagctctgttgcgttgatgcgaccgtgactcatttccataaaatgaatgtggccgttttcgtaggctgatgccaccagctccgcctcgttgttgatttttcccactgtggttatggcaaagctgcccaggtgggactgtatcagaaggggctggggttcggtgtcggaaatacatccgattcccaatgttccctcaagctcgtccaaatccccgtcaaacttcgtacggaagggagtgttttcaatattgtggatggatcttgtaaagccctggctgccgtatacggccattccgcctctttttgtccccagatgggagtgataatccactccgaaaaacaagtccagggtacagctgttttttgatgcaacaccaaatattccgcccatatgtcatacctcttttatctatgtgtttgctttacgtcttcacgattgattacggctctgtctgccggttacggacttatcataacatatattagtggtacaggacaatattattgatatattatttatacttatgaaaaactataagcatgccaggaagagttttccggtgaatattcacttgcgcaccgggatgacaattccatgcatttgaggtatacttgtgataaatcttcaggagctttcagatgtacttcggagaggaggcttgtaaatgacagaatcagatggacagaatgaacaggagatacgggccatccgcctgacagtggcgcaggatggcagcggtgactatgatacggtaggcgcggccctggcggccttgggagacaaggagggaccgccggcccgtatttatataaaaaagggcgtgtacagagaacggctggaaattaaaaggccgggaatcacattggagggccagacagccggcggcaccgtcattacctgcggactgtctgccgggatgaccatggaggacggcagcaagcggggaaccttccgcacctacagtgtgctggtggacacccacgattttaccgcaaggaacctgaccattgaaaacagcgccggtccgggcgaagcggcgggacaggcgctggccctgtatgcggacggagaccggatactgtttaagggatgcaggctgctgggaggccaggacacacttttcacgggccctcttcccccgaaagagatagaaaagaacggattcatcggaccaaaacagttttcacccaggataaacgggcgccactgctaccgggactgctttatacgcggggatatagactttatatttggaagcgccacagcctattttgacaggtgtgagctgtactctgccggccgggatacagagagaaaggggtatgtgaccgccgcgtccacccccaggggccagaaatacgggtatgtgttccgaaactgccggtttacaggaaacagctcccgtgaaagcgtctacctgggcaggccctggagggattacgccaggacggtactcattgactgctatctggggccccacatatgccgtgagggatggcatgactgggataaaaaggacgcgcggtccacattgttttacggggaatacggaagctatggaccgggggcggcgggccgggaggcatcggaacagggtaaaagggaccggggtacatcaaggccggactgggtttccatgcttacccgtgaacagatacaggactacaccatggaacaggttctgggcggaacggacgggtggaatcccggggcatatattgtaagaaggaagggataaacgcatggaattataccgtatcatactggtggacgacgaggaagaggtcaggcagagtatcatcaggaagattgactggacgggagccggtttctgcgtggttggggatgcggaaaacggggaggaggccctggaaaaagtggaggccctggagccggacctgatactgacggacatcaggatgccctttatggacggcctttccctggctgaacgggtgaggcagaaatatccctcggttaaaatcgtgattttttcaggctacgatgattttgagtatgccaagcaggccataaagctgaatgtgacggagtacatcctgaagcctgtgaatgtggaggagctgactgccatcttaaagcgcatcaaatccaacctggacgatgagatcgagcagaaaaggaatgtgagcctgctgcgtgaaaattatattcgcagccttcccattctcagggaccagtttttaaacgagctggtgggaagcactgtgcccggaaatgtacttaaggaaaagctggctgagtatgatatcccgctggcaggagccaagaaatgggtggccgcggccattgacatagagccggaggagatccgggaggggaatatgctgcctctccacaaggagagggacctgattcccatttccgtcatgcagatagtggaggagaagctggggaactattgccgttcttccgtattcacttcctccaggacctcctggtctgagctggcccttattgctgccattgatgaggataacagccagacaggactgattgacgtgctgggggatatctgcaaggagacaaagaagattctggaggtgcccatcaccattggcatcggccacagctgccaggacctgggggagatcagcggctcctataaggcggccgtggacgcccttggctataaggccatcgtgggagcgggaagcaccatctacatcaatgacgtggagcctgtaagcgggggaaagctgagttttgacagcaaggacgaagcggaactcattgcggccatcaagttcggccccagggagaagatagaggaagcagtacaggcggtcatggataaaatgagcgatgcaaaggtgcatttcaggcagtgccaggcatatatgctcagcgtgtccagctccattgtccagctgattcagcagtatgacctggacctggaacagctgacggaggagggggaggagcagggggatacctttgccgtcatacccaggatgatgaaaaaggaggactttgcccactggcttctctcggccgccctcaggatgaaccaggccatgaaccgggagcgggataataccatgaagcaggtcatccagaaggccagggaatatattattgacaattaccaggacccggatttatccgtggagaagatatgccgccagctgcacatgagcccggcctatttctccaccatgttcaagaaggagacagggcaggcatataccgcctacctgacccaggtccgcctggacaaggcagtggagcttctcaacaagaccgatgacaagacctatgtcatagcggccaaggtgggataccaggagcagaattatttcagctatgtgtttaagaagcgtttcggggtctcgcccaccaagttcagaggggcaaaatagatacaacaggcctgcggtgccgcttatggcgggaaggggcaggcagcgtaaaggagcaggggacatgttgtttgaaaagcagagggttaagctgcagaaggccagtatacggtatatcatattcatctactttacgctgacggccctggccgccagtatattcataggcatttccctgtattccaggctgtcgggccagatgtccgccaccatccgggaggagaaccagatactgattaatcagatcacccggtccatggaggattacctgcggaccgtgatgaagctgtctgattccctgtactacggggtggtcaagaacgcggacctggccagcggatccatcggaagcgagatgactcttctctatgacaacaacaaggacaatgtggagaatattgcccttttgtccaaggagggaaagctgttagaagccgtgcctgcggcccgccttaagacaaatatggatgtcaccggggaaaactggtttacctccaccctggagaagacggagaacatgcatttctccacgccccatgtccagtacatctttgacggcagcgagaaccaataccggtgggtcatttccctgtcaagggcagtggaaatcacccagggaccttccacggaccagggagtcctgctgattgacatacgctacagcagtctggagcagctctttgacggggtaaatctgggaaacggaggctatgtctacttaatcagcagcagcggggaaatcatataccacccccaggcccagcttattgactcgggaatcgtccgggagaacaacctggaggtatccggactcagggacggcaattaccgtcagaccgtggacggggaggaacggaccgtcacggttaagaccgtgggatacacaggctggaaggtggtgggggtgacgcctcttgacggcgtgtccctcaacaatatcaagacaaagcttctggtaattttcatgattgcctttgtcctttttatcatgaccatcatcaattcctatatctcctccaggataacggaccccatcaaggagctggagaaatccgtcaatgaaattgaggcaggcaatctggagacagaggtcaggagcggaggttcctacgagatacatcatctgggcaattccatacagaacatggcccggcagatagggcggcttatggacgatattgtggcggagcatgaatccaagcgaaagagcgagttcgacaccctccaggcgcagattaacccccatttcctatataacaccctggatatcattgtgtggatgattgaaaatgagaacctgaccgacgcggtgcgggtcgtgacggccctggccaggtttttccgaatcagcctcagcaggggaaaaagcattatagctgtcagggatgagctggagcatgtgcgcaactaccttatgattcagcacatgcgctataaaaataagtttacctataccgtggaagcagaggatgaggtccttgacttagccagtctcaagcttatcctccagcctctggtggaaaatgccatctatcacggcatggaattcatggacggcgacggggaaatccgcatccgggcatggtgccaggataaggatttattcatgagtgtatcggacaacggcctggggatgacccgggagcaggtgaaacgtctgttcggggacacggaccatgtgccgtcgggcaggggatccggtatcggagtgaagaatgtccaccagcgtatccgtctgtattttggaaatggctacggactggaaatccagtcggagccggatgaggggaccacggtcacggcccgtctgccggccatcccctacggggaagtaaagaaagagggagcctatgttaaataaaggaaaaatactctggtgcatatgggccggcatcctgatcctgctgtttttgatgtcctccacggatctgattatcaaggaaaagaaaatcgaggtatatccgatttccgtcatcatagagggggacaacgacgactattatgtgaatttcaaaaagggtatggaccaggccgcggtggagttccatggggatgtcagcttcatcaccctttatgccgaccatgaccaggcccagcagatggagctggtaaaacgggaaatcagggacggtaccagggctgtgatcctggctccggtaaagcctgaggaggcggtaagaaaattggaggatatgaaccccggctgccccgtcatccttctgggccagtctccggatgagggcacagctttggataccatcggcgcggacggcagggagattggaaggctgctgggagaggcggcggcttcccaggcacccagggatgtgccggtctatctcttttgcggggggctggactatggggacagtgcctgggtctacgagggggtcaggactgtgctggatgagcaggggtatcattaccggctcattgagaggaaaaaccaggacacataccgtcaggccatacaggaaacagacgctcccggaggcggcaggattaccattatagcactggatgtgcagtcgctggaccaggccacccggatactggaggaaaacaccatataccagggcagggtggcgggactctacggcgccggaagcaccacatcactgctcagggccctggacaagggaattgtcacagggctgactgcctatgaccagtttgacgagggatatttaagcgtgaagcaggcagtggaagctatccagggcacgcgccaaaagcagaacaccgtgctggaggccatctatgtggatgaggataagctgagggataaggcatacgagaaaatgctctatcccattgagtaagggcagttgtgatgaaaagaaacgtaataaggtaaggaaaggggcattgcggtgaaacggaattggatgtatctattggcagcctgtatgggagcggctgtcctcataggggtgtggcagtacatgggaagggaaaacgggcggcagatggataagaactccatccgcatcggggttctgctctaccggggggacgacaccttcatcggtaccctgcgctccggcctggaggacagggcaaaggaatatgaacaggaaacagggatcaaggtgaagttggatatcatggacgccaaggggagccagaatacccagaacagccaggtggagcgtctgatctccctgggctgcgatgccctgtgcatcaacagcgtggaccgttcgtcggcatccatcatcatagacaaggccatggatgcaggaactccggtggtgttctttaaccgggagccggtggaggaggacatgaaccgctgggaaaagctgtactacgtgggagcggacgccaaggaatccgccgtgctccagggagacatcctggtggatgcctataatcaggatacacgaaccctggacgccaacggcaacggactggtaagctatgtgcttctggaaggggaaaccagccatcaggactccctgatccgcacggagtggtccatccagaccttaaaggacgggggcgtacctttggagaagattacgggaggaatcgccaactgggacagaagccaggcatcagccctgatggagcagtggctgaaggagtatacgggccagattgaactggtggtcagcaacaacgacgacatggccctgggagccattgacgccataaaccgggccggaatcggggccaattccatcaaggtggtggggattgacggcacccctgtgggcataaaggccctggaggaaggatatcttttcggcacagtggaatcagataaggaacgctattcccgggtcatatttgacattgcctggagcctgtccctgaaccaggctccaaaggacagggtgcctcagctggatggaaattattactggtgcccacagagggctttgacccaggctgaggcaaaattgcttaaaaaccagtgatgtatcataaaaacaccgacggaaaaagataaaatcgaagaaattttataatcattctataaaaatcatatggaaaaatgcacaaccgggtcgtataataatcttgttgttaagcaaaaacaaccaaagacaacaaaactataagggaggaattaaaaatgaagaaagcattaagtgttgctcttgcgtgttccatggcattatcactggttgcctgcggtggcggcagcaagccaacggaagcaccaaccacagcagctgcaggggataccacaaccgaggcagcagcagacacaaccgcggcagacacggcagcggcaccggaagcaggcgcagaggtggcaaacaaggataagcctttagtatggttcaaccgccagccatccagcagtgctacaggacagcttgatatgacagccctgaatttcaataaggatacatattatgtagggttcgacgcaaaccagggtgctgagcttcagggaatcatggttaaggactacatcgagaagaacatcgactcaattgaccgtaacggcgacggaatcatcggctacgttctggcaatcggagacatcggacataacgactctatcgcacgtacaagaggtatccgcaaggctctcggcaccgcggtagagaaagacggcagcgtcaacagcgatcctgttggtacaaacgcagacggtacagcaacggttgtacaggacggctccatcgaagttggcggaaagacatacgttgtccgtgagcttgcttcccaggagatgaagaactccgcaggagctacatgggatgctgccacagcaggcaatgcaatcggcacatggtcttcctcttttggcgatcagattgatgttgttgcatccaataacgacggtatgggcatgtccatgttcaacgcatggtccaaggacaacaaggttcctacatttggctatgacgcaaacagcgacgcagtagcagctatcgcagagggctacggcggcactatcagccagcatgcagacgtacaggcttacctgactcttcgcgtactgcgcaacgcactggacggagttgatattgatacaggtatcggcacagcagacgatgcaggcaatgtcctgagttctgatgtatatgtttacaaggcagatgagcgttcctactacgcactgaacgttgctgttaccgctgaaaattatacagatttcacagattccacaatggtatacgcacctgtatccaatcagctggatgaggctgcccatgccacaaagaatgtatggctgaatatctacaactcagctgataacttccttggatcgacctatcagcctctgcttcagaaatacgataagcttctcaaccttaaggttgactacatcggcggcgacgggcagacagagtccaatattacaaaccgtcttggaaatccaagccagtatgacgcatttgccatcaacatggttaagacagacaatgcagcttcatacacatctctgcttgagcagtaatattcattgaaataaagatgtactgttattagggagaagaaattctccctaatattaaaattgaaacctatcaatctacatatacaggagtaaaataatggcagataagaaagatgatatcgtcttatcaatacgcggtatgagcaagtccttcggccggaacagagttctggaccatatcagcctggatgtgaagcgcggaaccgttatggggcttatgggtgagaacggagctggtaagtcaaccatgatgaagtgccttttcggcacctaccagaaagacgagggaaatatcttcctgaacggcagggaagtaagcttttccggaccaaaggatgctcttgaaaacggcattgcaatggttcaccaggaattgaatcagtgtctggaacggaatgtaattgacaatttattcctcggacgttatccggtcaattccatgggtgtaattgatgaaggcaggatgaaaaaggaagcagccgagctctttagaaaattgggaatgaccgttaacctcactcagcccatgagccgcatgtccgtatcacagaggcagatgtgcgaaatcgccaaggccatctcctacaattcaagggtgattgttctggatgagcctacatcctccctgaccgtgcaggaggttaataagctcttcgagatgatgaggatgttaaaggagcagggaatcgccctgatttatatttcccacaagatggatgagatttttgaaatctgcgatgagatatcagtgcttcgggacggcaatctggttatgacaaagagcaccaaggatgcaaacatgaatgagctgattgcggcaatggtcggccgttcccttgataaccggttcccgcctgttgacaatacccccggtgatgtgattctgtccatccagaatctgtccacaaagtttgagcctcacttgcaggatgtttcatttgacgtaaaagaaggagaaatattcgggctgtacggtctggtaggagcagggcgcacggaacttctggaaacaatctttggtgtccgcaccagagcggcgggacgtgtttattttaataaccgtcttatgaatttcagcagcgcaaaggaagccatggagcatggttttgccatgattaccgaggagcggaaggcaaatggcctgtttttaaaaggggaccttacctttaataccaccattgccaatctgcagcagtatatgtcgggcatagcgctttccgatgcaaagatgataaaggccacgtcaaacgaaatcaagatcatgcacaccaagtgcatgggccccgacgatatgatttccagcctttccggcggaaatcaacagaaggtcattttcggaaagtggctggagcgcagtccgcaggtgtttatgatggacgaacctacacgaggaatcgacgtgggcgcaaagtatgaaatatatgagcttatcatcaatatggcgaagcaggggaagacaatcatcgttgtttcttctgagatgccggagattctcggaattacaaaccgtattggtgttatgtcaaatggacgtctttccggaattgttaatacaaaagagacaaatcaggaagaacttttaaggctcagtgcaaaatacctataagggggattcatggatatggcgaaaggaaacaatgagactcttacggctgaacaggaaatgcagctgcgccagccaattgaggattatgttggcgaaattcagaaaaaaatcgacagtctcagagaggacggcacaaacagggtagtcactctgcaaaatagtattgatgcaacaaagagagaccgttcccttacaaaggaagaaagggaaaacagaattgcggctaacagcgcggagatggaaaaagcaaaggctgttgaggcaaagaacaaggatgagattgcaaaattaatctccgatgcggagagttaccttaaggcacattttgataaggattattatctgccgttaaaggaaagctgtgagcgggaaaaagcgcttgcaaaggaaaaatacgacattaaagttgcggaactgaacaaagaacatgaaaataccctctcaaagcttacggaccatcaggagataaaggatgagaagtatgttcataagaaccgcctgtttgacgcaaagatggacctggacaaggagcttcagcggatcaaggacagaaggcatgcggcatttgtctggcagtatcacctgattgacatgctccgcctgtctaaattcaccttcatggagaccagggcgcagaaatgggagaactataaatatacattcaaccgcaggacattcttactgcagaatggactgtatatcgctattatcctgattttcatcggactgtgtatcgctgcgccggtgataaagaatgttcagctgcttacctataataacgttttaaatatcttgcagcaggcttctccgagaatgttcctggctctgggcgttgccggactcatcctccttaccggtacggacctttccataggacgtatggttggtatgggcatgaccaccgcgacaatcatcatgcatcagggcatcaacacaggcgctgtgttcggacacgtgtttgacttcacaggcatgcccattggagtaagagtggtatttgccctggtaatgtgtatcatcttatgtacatgctttacggccatcggaggtttctttaccgctaaattcaagatgcatccgttcatttcaaccatggccaacatgctggtcatttttggacttgtaacatatgccacaaagggtgtatcctttggcgccattgaaccggctattccaaagatgattattccaaaaataaacgggttcccaaccattatcctgtgggcagtggctgccatcgtaatcgtatggttcatctggaacaagaccaccttcggcaagaatttatacgcagtaggcggcaatccggaagcagcagctgtttcaggtatctccgtattcggagtaaccatgggagcattcattctggcaggcatcctttacggattcggatcctggctggaatgcgcaagaatggtaggttccggctccgctgcttacgggcagggctgggagatggatgcaatcgcagcctgcgtggtcggcggcgtatcctttacaggcggtatcggtaagatttcaggcgtagtagtcggcgtgcttatattcaccgtgctcatctactcccttaccattctcggtatcgacacaaaccttcagttcgtatttgaaggtatcatcatcataaccgctgtaacacttgactgcttgaagtacgtacagaagaagtagtgggaagttaggtgcttccgtccgtgattgaaataagtctgggggctgtggatacggctgcgggactagtatttctaggacgctgaaaatcggctaaatacaagaggctggctgccaaaactcgcggccaagcctctttttatatttaggtactgagctcaaacagttgtcagccagcctcttaacgccgctttccaccgtccaagaactacacgcttagcatataaaatactagccccgcagctgtatcccaatccccctctccctttccctcacggacggaggaacctccccctcccctgcatctactaccatccacaagccaacctgctattttgatactccctggtaaacgtaacatccctcccaaaccactccgggggctggaaggacatggcttcttcttcggtggtaaattccacctcggccaggacgaggccggcgtagcggccttcaaagacgtccagctcaatggtcagatgatctgagttatccagagggatgagataacgctttttggtgagtacggagccgtcggccttgggaagcaggtgggcgtaggcttcgcgggtcagcggaaggttgtattcttccctggacaggagtcccttgcccttataggtgaggcagaagtcctcatcctcctggcggatgcggactaccgggtcagtgcagagataggcctgttcaatctggtggaagggatgggtgtcatagccctccggaagacagggaaccaggaatttacgttcgatttccatatgggaaaacctccttgctgtgattgtcgattagtggattttactaactatttttattttttccattttacaatcatatcatttaactcttttcctgaaaagtgataaatgataaaataaaattactatgcgataaatggcggaaagggagattatcatggcaaaggtttatgcatttcttgcggatggactggaagaggttgaatgtcttgcggttgtggacgtgctccggcgttccggtgtggaggtgacactggtgtctgttacaggagacaggaaagtaattggttctcatggaattgagttggtgactgacgccctgtttgatgatgtggatccggatgtgtcagatgtgctgtttttgcccggaggaatgccgggaacaaacaatctgaaagcacataagggtctgagggcggctgtggagtgcgccaacaagcagggcagaaggattgcggccatctgcgcggcgccaagcatcctggggagcatggggctcttaaagggcaggacggccacctgctatccgggatttgaggaccagcttacaggcgtgtcctacaccagccagggtgttgtgacggacggcaacatcaccaccggcaggggcctgggatttgcccttgacatgggactggaactgattcgcctgcttcagggtccccagcaggcccagaagattgcagcggcaatccagtataactggaaatagtatccggatgagaaaaactcctgttctgttctatatcatatggatgtgggatggaatggaagttttttttgtaaaaaacgctggtgtttttaaaatgagcatgctataatggtacattgaagtgtagcgccctcatggattatgggcgaaccacatatattttaaggaggaacccgtaaaaatgagtgtacaagtagaaaaattagaaaaaaacatggccaaactgacaatagagttaagcgcggagcagtttgaggatgcaatgaaaaaagccttcaataagagcaagaacaagtttaatattccaggcttccgtaagggcaaagcacctcgcgccgtgattgaaaagatgtatggcgaaggcattttttatgaggatgccgctgatgaagccatcaacgcaacctgcatggaggcaatgaatgaaagcggactggagatcgtttctagaccggaagttgccgtagatcagattggcaaggacaagccgttcatctataccgcaaccgtagccgtaaggccggaagtgaccctgggcgagtacaagggcatcgaggtagagaaggtggatgcagctgttaagccggaggatgtggaagcagagctcaagaaggttcaggagcagaacgcaagacttctgaccgtagaggacagaccggttgctgacggcgaccagaccgtcatcgactttgagggatttgttgacggcaagacatttgatggcggcaaggcagctgattacccattgaccattggttcccattcctttatcgatacatttgaggagcagctggttggcaagaacatcggagaagagtgcgagattaacgtaaccttcccggaagagtatcatgcggctgaactggccggaaagccggcaacctttaaggtgactgtaaaggaaatcaaggtaaaggaacttccggaactggatgatgagtttgcaggagaggtttctgaatttgacactctggatgaatacaagaaggatattgagtcaaagattcttgagagaaagcagaaagaagctgcttccgaaaacgagaaccgtgtagttgacaaagtagtggcaggcgcttccatggagattcctgacaggatggtggaaggccagattgacaacatggttcaggatacagcccgccgtatggagagccagggtctgtccatggatctgtacatgaagtatacaggtatgaccatggagcagatgagagagcagatgaagccacaggccttaaagagaatccagaccagactggtgcttgaggaagttgtaaaggctgagaacctgcaggtttccgacgaaagactggatgaggagattgccaagatggcggccgcttaccagatggaggctgacaagttaaaaggttatatgtcagaccgtgataaggaccagatgaaggaagatattgctgttcaggaagcggttgatttcctggtggcagaagcaaaactggtataattcacatatgatacggggggttcacagcgcttatttacctggctttgaatctccctggtttcttataagtgaacgtcattttgtccgggcggtgagatgccgctcctggcagggatgacatgaattgcacacaggtgtctgaatgacaggcgccaagtgcctataactaggaggatggttaaatgagtttagtaccttatgtcattgagcagaccagccgcggcgagcgttcttatgacatttattcaagattactgaaggagaggatcatattcctgggcgaggaagtaagcgatgtgtccgcaagccttgtggtggcacagctcttattcctggagtcagaggacccgggcaaggatatccatctatatatcaacagcccgggcggttccgtatccgcgggatttgccatctatgacaccatgaattatattaagtgcgatgtgtctaccatctgtatcggcatggcagccagcatgggcgcgttccttctttccggaggggccaagggcaagcgttttgctctgcctaatgcggaaatcatgattcatcagccttcgggcggggccaagggccaggccaccgagattaaaattgtggctgagaatatcttaaagacaagaaagaaattaaacgaaatcctggcagcaaacacagggaagcccctggaagtgattgagcgcgatacggagcgtgacaattatatgtctgcattggaggccaaggaatacggccttattgatgaaatcatcgcacatcattagtgctgcagcccagcgctgaggcatcaggccggtaacgtaaaacagcaagtaaaggatatgaaaggttaggtatcgtatgccaatgagaccagatgacacgattcggtgctccttctgcggaaggacacaggatcaggtacgaaagatgattgccggagcaggcaacaacaatgtgtatatctgtgacgagtgcatagaattgtgctctgagattctggaagaggagctggaaggccaggatgaaggggagagccccgcgctggccgatatacgtcttctgaagccaaaggaaatcaaagcatttttagacgaatatgtcatcggacaggatgacgccaagaaggtgttgtccgttgcggtttacaatcactacaagagggtgacggcatgccagaacatggacgtggatgtacagaagagcaacatcctcatgttagggcccacgggttcaggcaagacttatctggcccagaccctggctaagattctcaatgttccctttgccattgcggacgcaactgcactgacagaggctggatatgtgggcgaggatgtggaaaacattctgttaaagcttatccaggcagccgactatgacatctcccgtgccgaatacggcattatatatattgacgaaattgataaaattaccaagaagtccgaaaatgtatccatcaccagggatgtttcaggcgagggcgtccagcaggcgcttctcaagattctggagggtacagttgccagtgttccgcctcagggcggcaggaagcatccgcaccaggagcttcttcagattgataccaccaacatcctgtttatctgcggcggtgcctttgatggcctggagaagatcgtggagcagcgtctcagcgccggttccattggtttcaacgccgaggtgacaaacaagaacgacctgaacatcgatgagctgctcaagaaggtggagccaaaggatttgaccaagttcgggctgattcccgagttcataggccgcgtgcctgtgatggtttctctggaacagctgacaaaggaagctatggtgcgcatcctgtcagagccgaaaaatgccctgatgaggcagtaccagaagctgtttgagctggacaatgtgaagctggaatttactcaggaggctctggaggaaattgcacagctggcagtagaccgcaagattggcgccagaggactgcgctctatccttgaatcagtgatgatggaccttatgtatgagattccgtccgatgattctatcggaatctgtaccattaccagagacgtagtgagaaaggcaggacagccggaattagtataccgcgacatgcctcctgcatctgcccgaaaaccgttgtcagaacggcttaggggggacagtaagacaggagaaattgcgtaggctgtcatgctcctgtgacaatttagaagagagaaagggccgctgcaaatcagatatgacccggaccagaaggcttgttttccggccggtccggcacctgcattgcagcggcttttcaaatggttaagatacaagaggggaagattgagaatgggagaacaagtgattacgatgcccgtggtggccctcagggggctgaccatacttccgggtatggtattgcatttcgatataaacaggccgaaatcagtggccgccgtagagcgggccatggtgggagaccagaaactgttccttgtggcccagagacatcctgaaatcgtggagccggagcagggggatttgttccaggtgggcactgtggcggtggtgaagcagctggtgaaactgccgggcaaggtggtacgcgtgctggtggaaggactggagcgcgctgagcttctgtgtctggaagccgaggaatcggccatgatgggcgagatagcagccatagaagcggaggaggatgatttggacagcctgactcaggaggccatgctgcgcatcctgaaggacaggctggaagaatatggaagagttaattccaagattacgaaggagattctgcccaatctgctgattattacagatctgaatgagatgctggaccagattgccattcagctgccatgggattataccatccgccagacggtgctggagaacagctctttgtcagccaggtatgaggtagtgatgcatactctgctgactgaaatggagatatacaggattaagcaggagttccaggaaaaggtaaaggctgatatcgaccagaaccagaaggaatacatcctcagggagcagatgaaggttatccgccaggagctgggagaggatgctgtgtcggatgcagacgaataccagaagaaactggacgcactgaaggctgacaaggaagtaaaggaaaagctccacaaagagattgagcgtttccgcaatatgccggccggaagccaagaggcaaatgtgctgcgcacctatgtggaaaccctgctggacctgccatggaagaagatgtccaaggacaatgacgacatcaaacatgccgagaagatactcaacgaggaccactacggactggaacaggtaaaggagaggatcctggaatacctggctgtccgcgccctgactaagaagggcaccagccctatcatctgtctggtgggacctcccggaaccggcaagacatccattgcccggtctgtggcaagagccctgaataagaaatacgtgcgcatcagcctgggaggtgtccgggacgaggcggaaatcaggggacacaggaaaacctacgtgggcgccatgcccggccgtattgtggaaggcatgcgccaggccggtgtgagcaatcctctgatgcttctggatgagattgacaaggtcagcagcgattacaagggcgatacctcctccgcgcttttggaggtactggacggggaacagaatgtgaaattcagggaccattatgtggaacttcccattgacctgtcccaggtactgtttattgccacggccaacaccacccagaccataccgggtcccctgctggaccgcatggagctgattgaggtcaacagctacacggaaaatgagaagtttcacatagccagggactacctggtgtcaaagcagatggagcgcaacgggctgaaggacagccagattacattttccgataagagcctggaaaaaatcatacacaactacaccagggaagcgggcgtcaggaatctggagcgccgcattggggatgtttgccgcaaggcagccagacagttcctggaggataagaagaagtccatcaagatttcggagagcaatctggaaaaatatctgggcaaggaaaaggtgacctttgaaaatgccaatgaggaagatgaaatcggtattgtccgcggcctggcctggaccagtgtgggaggcgatacccttcagatagaagtcaatgtgatgccgggcaagggaagccttctgatgaccggacagctgggtgatgtgatgaaggaatccgcccagacagccttgacctatgtgcggtccgtgtgcccggaatacgggattgccgacgattattttgagaagcatgatctccacatccatatcccggagggcgctgtgccaaaggacggaccatccgcgggaatcaccatggctacagccatgctgtccgcggtgacaggtaaaagcgtccaggccaaggtggccatgaccggggagataaccctccggggacgggtcctgcccatcggaggactgaaagaaaagatattggcagccaagatggcccatatagagaaggtactggtacctgacaagaaccggccggatatggcggagctgtccaaagaaatcaccaaaggactggacattgtgtatgtaaaggccatggaggatgtggtgtcggaggcatttgtttagagcgcggataggaattaggagaaacagatatgataataagagacgtgaatctggaaacagtttgcggcgtgaccagcaagctgccggagaatacattgccggagtttgcatttgcgggcaagtccaatgtgggaaaatcatccctcatcaacgcgctgatgaaccgcaaagcctatgcaaggacctcctcgcagccgggaaagacccagaccatcaatttttacaacatcaacggggcattgtactacgtggacctgccgggttacggctatgccaagatagcggttgaggtcaaggaaaaatggggcaagatgatagaacggtatctcaggaattcccagatgctcaagatggtattcctgctcattgatatccgccacgagccctcggctaacgacaagctgatgtatgaatggattatctttaacggataccatcccgtcatcattgccaccaagctggacaagattaaccgcagccaggtacaaaagcacgtgaagatggtgcgggaaggcctgggaatggaaaaggacggcatcatcattcctttttcggcagagacaaagcagggcagggatgatatatgggatcttattgaggggagcctgtaggctgcccctattcctgttaaaaaaattgatttaataaagagaagaaaggcccggtttcctgacagacgagtattgcccgcaggaaatcaggcctttacgctaccggtaagtctccttcaccggctcgaaaaaataccttccgtaagacggaatataccggccctgcggatatccggcccgtggtctggtcccgggggtgcagaatgtagggttcatgctctgtatatgtgatatccacccagggatagcgaaagccttccctgaccatggctttttccgccaggggatggcccggggccgccaccaggcaggagccacgcatcagggccaccgctatggtcagctgtcccttttcctcacctaataaatcctcacattccgaattccggtcagagcatatctggcagatttacaggtgaatcctgtcagattcagctcgacatatccggcatttagcgtataatagataaaggtatgaaataaaataagacagcccggggtgatgggattgcagacgcgcagggctgtatctggaggtattatgtaatggaaacgggaccaatacgggtggctgtcatggcggacacccatggagtgctccggccggaggtggagaggattctcgaaacctgcgatgtgattgtccatgcaggggatttcgacaatcagatgctgtatcataagctgaatgtggaccagccactgtacgcggtaaggggaaataacgacaggggatggtccgggggccttggacaggtgaaccggtttgaaatcggaggggtcaaatttatcatggctcacgaaagagtggatattcccagcgtgctcaaggatattcaggtggtcatattcggccattcccatatgtattatcagcaggaaatcagcggaaggctttggctgaatccgggaagctgcggttataagcgttttaccctgcccctttccatggccgtgatgaccattgaggaaggaacgtatgaggtggagaccatctggctggaacatgggtacgggacgccgggagcagccaccagccagagggaaaaggccaaagccagcaagtatgaaaagcatcagaaacgctataagcagaagcaggcaaagggcgcgggccagacggataaggcaaagggcgcggtcatggcagccagatacgggggacagccggcagccaagcaggaagccgtcaaacccgtcccggaccaggaaaaggaatacctgttcctcatagcgaaaatcttacgcctgagaaaggccggtgaatccagggaatgggtcatccggaacctgggggagaatttcaggctggcagcaaccatctatgatatatgcgaaaaaaagccggacgcaaatgcccggcagattttagagctgttattggaacaaatctctttttagtgaaaacgcttcccggtggaagcaggtataccggcacagcaagtcaggataaaagtgaccgcatgacatgggcatagatttcctggctttttgttttccatgtattgcacatggattctgcctgctccctgtcgggaacagacaaatccagacgaatcagggtggtcttattctcgcggacctcacagtggacaatgtagtcctgattggttcccttgtagaagtcggccgtggttcccacctcctcccggagacggaacttattctccttgaggtactggttcatgtcttcaatgatggcggaggatatgttcttgccaaagaagttgagggtttcctcgccttccctggtgatgtcataacgggtgctgttgtggctggcctccttgtggaccaggccggcgtcttccagctcatttaatgcctgctggagggtgaaataggtggtgtattcatgctctgtgaaaaagttggtgagctgggcgttcgtcagggggaagttcacctgcttcaacatatagagattcatcagtttgtacaaggtcataggttcagtaagcatatcacacacgctccatcagggttttcttattattttctaatgtggtcctttaccgcgctgctgaccacatctgccacgcgggggtcaaaggcttcgggaagtatgttctcgtcgtttaaatccctcccgtccaccagtcctgcaatggcttcggcggcagccagtttcatttcctcggtgatggcagaagcacggccttccagcgcgcccttaaagattccggggaaaaccaccacgttgtttacctggttgggaaagtcggaacggccggtcccgaccacacgcgccccggcagcctttgccagatcaggcatgatttccggtacggggtttgccatggcaaagaggatggcgtccttattcatggatgccaccatgtcctgggtcacgattccgggagcagacacgcccacgaagatgtcagcgcccttcatggcatctgccagggtaccggtcctgtgatccaagttggtcacgtccatcatcttttcctgcatccagttcaggccctctgcgcccctgctcaggatgccgctcttatcgcacatggtaatatggacgaatccataggtcagcagcagctttgtgatggcaatgcccgcggagccggcgccgtttactaccacgcggcaatcttccttctttttgccggtcagcttaagggagttgataacgccggccaggaccacaatggctgtgccgtgctggtcgtcgtggaacaccgggatgtccagtctctcttttaatgcctcctctatctcaaagcatctgggggccgagatgtcctccaggttaatgccgccaaaggcgggagcgatgcgcacaacggtctcaatgatttcctgggtgtcctgggtatccaggcagatggggaaggcgttgacaccgccgaattccttaaagagcacagcctttccctccatgacaggcatggctgccagaggacctatgctgcccaggcccagtacggcgcttccgtcggatacaacggcaatggtgctggatttgatggtataccggtaagccgcctccgggtcggcggcaatcaccttgcagggctcggcaacgcccggggtataggcaagggccaggtcttccctggaggcgacctttgcttttgatgtggtttcaagttttcccttccattcctcgtggagcagcagtgctttctcattggttgtcataatccgttccgtccttttcattatcatagtagaaacacaaaaatgcatttttatatatcataacaattttgtaagtgtttatcaagttccttttgaaattggtgcggtttgccagacctgcatttttgaaatcatctgggtatggcggcgcttgtgcggcggtgcgaaccggggagggggagaacaaaggggaaatggaagaacatggaacccatggtttgtacaaaagatgtaattaaaacttttaaaaccacccaaaatgtgatatcatgttacgtaagtgcggacattttacacagaaggataaagatacaggtggtactatgagggaacgtattaaccgtctggccaggggaatcattgacaatggttcgccggagctggtgctgacaccggaacgggtggaggcttcggttcccgcgggtgaggtcatccgtggcgagatattggtgagcagcggcaataacctgcatataaaagggctggtgtattccagccatgaaagggtccgggtggtgaacagcgcctttggcgggcttcgcaaccggattatatatgaagtcaacgtggatttttcagagcatggggacgaaatcaagggatctttttacctggtcaccaatggcggtgagagggagattccttattctttgcgcgtacaggccggtgattcaggggaggttctgggaaacttaaagactcccagggactttgggctgctggctaagaaggacctggaaaaggcgctgaggatgtttgaatatcaggattttacagaggcccccttcatgcaggattcccgggtccgtaccatctatgacgggttaaagggaagggccggcagaaggaatctgctggaggaattcctggtggccctgcaggtgaaggaaccggtaaagcttacgctggagaccggaaccaggacctatgagaatctgaccggaatcgcggaagattatatagatatttcggcaggaacctgggggtatgtgtcggcggacataaccgcggatgctcccttcattgaactggggacctcccggattacagaccaggattttgtccagggccggtgcagggcgggataccgcattataccgtccaggcttcacaggggaaggaattttgggtgcatccgcattaaatccatgggggaggaattccttctttccgtggaggcggaggggcagcgcggagccggcagcgcggagcgggaatccggggcggaccggttcatggaccatgggagcttatataaatacctggctctgcgtctggactatgaggcaggggtttatgagccggcccttctcctgaaccagatgatgaaggagacagagcatctcagagctgattttccgggggacgagagggccaaactgatacaggcagagcttcttatattaaacggcagggaggacaatgcctccctggctttagacgacgccagggaccatgtgctggcccacagggaagagcaggttgaattatactgcttctaccagtatctgcgcctggaaatcaagccgtctgtccagcagaaggaatccctggtccgctatatacgcaagcttttatgggaggatggggagatacggccttatctcttcctgatgctgatgaagttggacgaaaccatggcccagaatcctctggagctgtaccggtccatggcatcacttttcaatcagggctgcagcagcccgttcctctatgcatcggcctgccgtctgatggaagcccatccggatttgtttgtgcgactgggcgattttgagatacaggcgctgtatctgggtgtacagaaaggaatcgtcagccgtttgaccgccctgagggcagcgggactggcactggagcttaagcattacagaaagctggtggaacgcttatttgcaaagctgtaccagacatatgaggagcaggagattctggaggcagtgtgcagcctgctcatcaaaggggaccgcaaggaaagggacgcatttacctggtacgagaaggccctggaacagggggtaaacctgaccaggctctacgagtatttcctctattcactgccggaggattacggacacctgctgcctaaggaggtgctgctgtatttctcctatgataaggatttgaacaggcacagccgccaggtgctgtaccggaatatattggaatacatgaatccttccgcggagctgtaccagagctacaccaggcatatggagcagtttgccatggaacagctgttccagtccagaatcaaccgatccctggccgttatttacgaacacatgatttataaggatatgatagacagccgggtggccagggttcttcccggcatccttaagtcctgccgcatctggtgcggggattccagaatgaagtatgtcattgtccgctatgaggagctggaggacgaggaggcatttctcctggaaaaccagtctgcttatgtgcccctgttttccgaccgcagcgtcctcctgtttcaggacgcatacggcaaccggtatctggacgtgaagcactggaaggtatctgtcatggaccgcccggaactgctggcccagtgctatgaggtatatccggaccatcccatgctcaagctttccgaatgcagggatattgtgaaccgcggggtggaaacggacgaggaggcagcgctgctggaagagatcgtgactcagatgcatttgagccctgtctttgagggcaggctgatgcaggcggtgacggattattactgccagaaggcgtctgaggataaggacggcgacggtgtatttaactgcgcctatctggtgcagattgataaaaggcccatggctgccaggcagaggcagcagatatgcgagaccctaatcagccagaattatatgcgggaagcttataacatgattcgggattacggaagccagtatatatccacgccacggctgatgaagctgtgcaccaagaccatactgatgaacctgtttgaccaggacgagctgcttctgggcctgtcccatcaggtgttttgccaggggtgctatgacagcgtgatcctggactatctgtgtgagcatttcaacggaaccgtatcccagatgtatgaggtgctgattcagggcgtcagggagcatgtggagacatatgacctggaggagcggctgctggggcagatgctgtttaccggctgctgcgaccagatggattccgtgtttgaactgtacatgaaacgcaagaccaccagggaaatggtggtaaaggcgtattttacccagaagagcgtccagtacttcctggaagaaaaggatatggaccagagggtgtttgaatatctgaagcaggcagtgggcaatacctttgacaaggacaggatgcccaccatctacctgctggccctgacgcggtatttttccacgctggacaaggtggaggagggggatgtggaactgttaaagaccatgacatccctgcttttggaggaaggactggtatttccatataccagggagctgtcaaagcatattccggtgccggaggatatcatggacaaggccatggtggagtaccggggcaggaaagacgctcatccggagcttcaggtgagaatcctgcccgaggaaacaggatttcacagtgaggacatccgccgtgtataccaggggatttttgtgaaacaaaaggtactctttgagggagagatcatggagtacaggatatatgactatctggacggacaccgcaggcttgcggcagagggacaggtggagtgcgaccataagctggagggaaaggagaacagccgttttgcctgcctgaacgagatgggagcggcaatcaaagacagggatgacagcaggcttttaaacgcgatggaagactatctcaaaaagtcggcggcgcttggcaggctgtttcccatggagtaatggaggaactgtctatggacggtctagtgattggtctggatttaaatgacgactatacccagatatgctgttatgataaagaaaagtcgtggaccattcctacggtcatctgccggaggaaggaagaggaagtctggctctcaggggaggaggcctatgcggccactctgctgggagagggagtcatcgtggataagcttcttaagatggcggccaaggatgggacatccaccatcggaggcatctgctacggcggaggtacgctgcttaagctgttcatagagaagatgttaggttatcccagaaaggaattcggtacagatgaggtggcgcagctggtcattacccttcagagcgtggactgcaggctgcttgacactctgatgtactgtgccgactatctggagataccaagggacagggtccatgttatcagccataccgagggcttcatatactatgttctgagccagaaaaaagagctgtggaccaatcaggtgggactgtttgagctgtccggcgaacgcctgtgctattatgagatgaaggtgcagaggggtatgcggcgcaacatggtccaggcagaggcccagaaccaggaggaggcatttaacctggatatactggactcgccctcaggcagccgtctggcagataagatactgacggcctgcggcgaaaagcttttaaacaggaaactgttttccacggtgtttctgacgggtaagggctttgagcgccaggactgggccggcggatttatgcggttaatctgcaaccggagaaaggtatttgtggagtcctgtctctttgccaggggggcggcttataagggagctgattatacccaccaggagacctcctacccctatgtatttatctgcgagggaaggcttaaggcggaggtgtccttaaaggtcatgcgcagagggcgggaaaaccagctggtggttgcttcctacggcgacaactggtatgaatccaaaagctccatggatttgattgtggacggacagaaggagatagagtttaccatcagtccgctggactccaaaaagaaaaagctggtcaggattccgctgaccggatttccggaacgccctccaaagaccacccgggttgagcttaaggtggcatttacagatgagggtaccatgacaatgtctatccgtgacaagggattcggggagctgttcccatcctccggcgcggtggtgaaacaagaggtgaagttatgagcctgatactttgcagacaggaacctgtgaaacatccgtattatatcgatgtgctgggaatccatatccactcatcacaggagctgtgttatatcgtatacaaccatccggttctggtgatggatgagttcctggatgatctgttgattgattttatccgtaaggatttggatatggattatctggcaggccgaatggagaagctggtggaaaccggcaccagaccggaggaggtcctggccctgttcctgtcggaatgcgattattacagtgacaaggaaatacagaaattcaagcagaccacagcggccctgcgtgccctgcatccggcccagtatgaaaagcagagggcggattatatgttcgtacagcagcagtacggcaaggcggcggccagatatgggaagattctggaatatcccagggataaggtggtggaggatctgtttctggcaaaggtttacaacaacctgggcgcctgctacgccatgatgttccagtttcacaaggccctgagctgctatgacaaggcctatgagctgggaaaggatgatgctctgctaaaacgcatttatttcctcactgtctttgcgccggagctggatgtgaaggacaagtaccagtccgtattcacggatgagcgtaagagaaagtggagcggggaaatagaccttgctgcgctggaggcaggccaggcagaggaagtcagggccctgcgggcattatttaaaaaggatcccatcaaacggatgagcggcgcggccgagatggtgcgcaggtggaagcaggagtaccggatgatggtctgagtatatatggcgtgagaaggttcggagattaagaatacgataataacggaggtattacatcatggcgtttgacatggcaaaagaacatctgagaaaggccggcctggaggatcggatttatgagttcgaggtatccagcgccacggtggagctggcagcccaggcagtgggatgtgagccggcccgcatcgccaagacgttatcttttatggtggaccagaaggccgtgctgatcgtggcggcgggggacgccaaggtggacaaccataaatataaggagcagtttcatacaaaggccaggatgctgtcgccggacgaggtgacggagatggtgggccacagcgtgggaggcgtgtgcccctttggcgtgaaggaaggagtatcggtgtatctggacgagtcccttaaacggtttgatgtggtgtacccggcctgcggcagcgccagcagcgcagtgaagcttacgatacctgagttggagacagcctccgggtatctggggtggattgatgtctgtaaagggtggggggaagaacgtatatagatatatctaaaaatcggagaaagtgatatcatatcctacttacagatgggaaagctattagaggatacgggtccattttcataaggaaaagaggggtgatgcaggtggcttttccggctttgagagtgaggaggccagcataagcctcaccaaaaaacacttgacaaatcccacaataattattatgcttgataattataaatcaaagcaaataaaccaaacatgcaaatcatgcaaacaaagcaatccaatcaaacacaacggttatgaagaagaggagtacatcatataaaccatcagagagggcggtccactggctgaaaggcggcccgggcagagtatgatagaaggtagcttctgaactggagcggtgaaggataaaactgaacgactggcagacggacatttccgttttgccgccatgtaacgttttcttttgtgtagctgcttccgaccggcctgcgttaaaggcccaatgagactgccgggcatccggcaaaacaaaggtggtaccgcggacactccgccctttgccttcccttaaccgggattggcaaagggctttttattttcaggttatcaaaacctattaaaaaacccatctaaaaaaaggagaacaaaccatgaaagaactggagaaaacctacaacccggcggacatcgaggaccgcctgtaccagaagtggctggacggaaagtattttcacgcagaggtaaaccgcagtaagaaaccgtttacaatcgtgatgccgccgccaaacatcactggccagctgcacatgggccatgccctggacaataccatgcaggacattttgatccgctataagaggatgcaaggctatgaggcgctgtggcagccggggacggaccatgccgccattgccaccgaggtcaaggttattgataagcttaagaaggaaggcgttgacaaggcagacttagggcgggacggattccttaaggaatgctggaagtggagagatgagtacggcaccagaatcgtaaagcagcttcataagctggggtcatccgctgactgggacagggaacgctttaccatggaccagggatgttccggcgcggtcctggaggtctttgtcaagctgtatgagaaaggctacatctataaagggtccagaatcatcaactggtgtcctgtatgccagacctctatctctgatgcagaggtggagcatgtggagcagaacggcttcttctggcacatcaattaccctgtagtgggagagcctggccgtttcgtagagatagccaccaccaggccggagaccatgctgggagacaccgctgtggcggtgaacccggaggacgagcgctatcaggacatcgtgggcaagatgcttaagctgcctttgacagacagggagattcctgttatcgctgacccgtatgtggacaaggagtttggaaccggatgcgtgaaaatcaccccggcccatgaccccaacgactttgaggtgggcaagcgccacaacctggaggaaatcgtcattttaaacgacgatgccacggtaaatgttccgggaccatattttggtatggaccgctacgaggccaggaaggccattgtggctgatttggaggcacagggcctgctggtcaaggtggttccccactcccacaatgtgggaacccatgaccgctgcaagaccacggtggaacccatggtgaagcagcagtggtttgtaaagatggaagagatggcgaagccggccattgaagcccttaagaacggaagtcttacctttattcctgagagcttcggaaagacatatctccactggctggaaggaatccgcgactggtgcatctccagacagctgtggtggggacacaggattcctgcttattactgccgggagtgcggaaaactcgtggtttccaaggaagcgccccacgcctgccctaagtgcggctgcacctcatttaagcaggatggggataccctggatacctggttttcatccgccctttggccattctctaccctgggctggcctgaaaagacagaggatctggattatttctatcccacggatgttttagtaaccgcatatgacattattttcttctgggtcatccgtatggtgttctccggcctggaacagaccggaaagcttccgttccacaccgtgctgattcacggtctggtaagggacagcgagggccgcaagatgagcaagtccctgggcaacggcatcgatcccctggaggtcatcgacaagtacggcgcagacgccctgcgcatggccctgattacgggcaatgcgcccggcaatgacatgcgcttttactgggagcgagtggagaacagccgtaactttgctaataaggtctggaatgcttcccgattcatcatgatgaacattgagaaggctgcccagtcaggcgaagtggctttggaccgtcttaccatggctgataaatggattgtgtccaaggtaaatacccttaccagagaagtgacggaaaatctggataaatacgagctgggaatcgctcttcagaaggtttatgactttatttgggaagaattttgcgattggtatattgaaatggtgaagccaaggctgtacaatgaagaggatgatacaaaggcggccgccatctggactcttaggcatgtgctgattcaggcgctgaaactgcttcatccgtttatgccgtttatctcagaagaaatattctgcaatcttcaggaggaagaggaaaccatcatggtatcccagtggccggtttacagggacgactggagctttgcaaaggaagaacagtccacagagactatcaaggaggccgtaagggctatccgtggcgtgcgttcatccatgaacgttcctcccagcaagaaggccactgtttatgtggtatcggaggatgaagggctgctgaggatattcgagcacagcaaaagcttttttgccaccctgggttatgcgggagaggtaattctccagaaaaataaggacggaattgcagatgatgctgtttccgcggtgattcacagggcggtaatttatatgccgtttgcggatctggtggatattgagaaggagatagagcggttaaagggcgaggaaaaacgtctggcaggagagctggcccgttccagaggcatgctgggcaatgagaaatttgtcagcagggctccggaagcaaagattgccgaggagcgcgcaaagctcgaaaaatatgagcagatgatggagcaggtgaagttacgtctggcacagcttcagtgataaactaggagaaggattaggacaaggggacaggcggtttcttccgcctgtccgcagggaagggaaaacagcggcaagtcagatacggggatagagaggaagagcatagcatgaatcaatcatcaggaaataagccggttatccatgtcaggatgttcggcggtttcatcatcacaatggatgaaaaggccatgagcgacagcgataaccggtccaggaaagcctggagcctgctgagctatctgataatcaagcgcaggggggatgtgagcattaatgagctgttccatgccatctggcaggacagtgttcaggataatccctacggcgcccttaaaaccctggttttccgggtgaggaagatgctggaggcagccgggttcccgtcccatgatttgattttgagccagaagggggcctatatgtggaacccggcctgggaaacagaagtggacactgaccggtttgagagcctgtgccggagaattctggatccggaaggggatgggaagaatatgcggggggcctgcctggaggcatttgaactatacaggggcattttcctgcctaagtcagccgaggatagctgggtaggcccgatggctgcctattaccgcacattataccagaagctggttgtttatatggcggaaaaactgattcaggatgaggagtacggtcaggcagaggaaatctgccaaagggccattgacattgaccggtttgtggaggatttccactattactggatctatgctgcttatggacagggagaacaggagactgctctgaagcggtataaggataccacggatatgttctaccgggaacgcctgatgacgccctcagagcattttaaggaattatatagggtgatcagcagcagcgagcaggaggtagtgacggacctggatgagatccagaagaatctgggcacgggcggcgccggagaggggcatggtgcataccagtgtgaatatgccgtgttcaagcgtctggtacagctggaacgcagaggcgtggagcgcagcggtgattccgtgtacctgtgccttttgaccgtgggagacaggaagggacgcaccctgaagccggaaattcaggcaagggccatggaacgcctgagggcatccatccagaaaaaccttcgttccagtgacgtatacgcacgttacagtgtcagccagtttatcctgcttctgtcttccgccacctttgagaacagcgagatggtcatgaaccggattctgtccgcttttaataaatcgtacgtgcgcaaggatgtggcggtaaactacagccttgacgtgctgaaaccctaaatatcagaggtttcctgacggtaaggcggctgttcaaaacagctgcacattaattacatacagcgaggtcagactatgaagataaaaaatgcgcttttgctgctgcttacagcctccatatggggggtggcctttgtggcgcagagcgttggaatggattatgtgggtccttttacatttaactgcgtcagatgccttatgggcggtgtcgtccttcttccctgcatatggttttttgacaggaagaataaaagaaggaaacaggttccggccatacccggagccagaaagacactggttatggggggaatctgctgcggcgtggccctttgcctggccagcaacttccagcagtttggaatccagtacaccacagtgggaaaggctgggttcataaccgcctgctacattgtcattgtccccgtactggggcttttattaggaaagaaatgcagtcctgtggttgcgggggcagtggttctgtccctggcgggcctgtatatgctgtgcatgaacggcggggaactgtcggtgaacaaaggggacctcctgatgctggtatgcgcgtttctttttgcggtgcatatcatggttattgacttcttttcccctgttgtggatggtgtaaagatgtcctgtatccagttttttgtcagcggcatactgtcaggaggggccatgctggtttatgaaacacctgaaatgagccagattatggctgcatgggcgcccgtcctctacgcgggcattatgtcctgcggcgtggcgtataccctgcagattgtgggacagaaggggatgaatccaacggtggcttccctgatactgagcctggaatccagtatttcagttttggccggatgggtgattttaggacagaggctttcgtccagggaagtactgggctgcgtcctcatgtttggcgccatcatactggcgcagattccggtgggacgaaacagggaagcttccttgaatacagaaggaaactagaaggcccgatacaaaaaaacggcaaatgggtttcctgtcgcatcctgacgaagggcggcgagaatatccggttgccaattgaataaaattaggttaagattataaaagcctgtccggcagacaggcttttaagaaagaatggattttagttatgggacaagcagaggagtatttggaccgcattcccatgtggaccaggaaaaagaattcattggaggatgtcaggcggtttctggattatctgggaaatcccgaccgggacagaccggcgattcatgtggcagggaccaatggcaagggttctgtgtgcgcattcctcacctctattttagaggaggccggatacagcaccggtaccttcatctcgcctcatttggtggaggtgcgtgaacgtttcctgattaatggaaggatggtggaccaggaaagctttgaaggggcttttgagactgtccttgaggccagcaggaagcttgcggaccagggactctgccatcccactttttttgaatttctgttttatatggctatggttctgttcagaatgcgtgatgtggatgtgatgattctggaaaccggtatgggcggcaggctggataccaccaatgtgctggaacggccggcggcctgtgtgattacctccatcagcatggaccataccaagtatctgggcgacaccctggccaagattgcgggggagaaggccggcatcatcaagaccggcgttccgcttatatttgacgacgggcagccggaggtttccaccatactggagggctttgctttccgcaggggagcagccagatacccggtgggacgggatgattttcatgtggaggagataggcgaaaagggcctgtccattagcgcaaggatgaagggcggcagatgtctggaactggagattccctttgaagctttttatcaggcggagaacgccatgctggctgtgcgcaccctggacgttctgcgccaacccggggagtgtccaaggacaggatgccggatgccgggccacggtccctgcatctgtccggacggaatggaatggggaatatcggaccagcacattgtaaagggcctgaagaatacattctggcccggccgtatggagcaggtgaggccgggaatctatctggacggcgcccataatcccggaggtatcgaggcgttcatacagacagccggggaaatctcgcacagacagggaaagaagccgtggctgctgtttgcggctgtttcggataaggattatgagcgtatggcagagcagctgtgtaaggaaatgatttgggaagcagtgggcgtggttcatatgaacagtgacagaggactggcggccgaagcgctggccagggtattcagaacatatacgtccagacctgtttactcatatggggacacgaagagcgcggttttggacatggcggaaaaaagccgggaaggactgttgttctgtgccggttccctgtatctcataggcgagattaaggctgtactggagcagaagacctgagcagtcctgataagataggagtgatatacatgattgattttgaagaggagattgagcgttttaaaccaagcctggatgtggaagaggtggaggacgccattgttaagagtgatttaacggatatgacggacatcatgatggaactgataaaagaaagaggcgagcgggacctgtgaatacagactatgcaagaaaaaaccagcagatagccaacagcttctacaacctgggcctggaaaaggccaggatacgggatctgtccggcgcggcccagtgcctgaagaagagcctgcattttaataagtatcagacaaatgccaggaatctgctgggactgatatactatgagaacggggaagtggcagatgccctggtacagtgggtcatcagcctgaacctgcagccggaggataatctggcggaccattatctggatgagattcaaaggaagccgggacagctggagatagagagccagaatgtgaaaacatttaaccaggccctctggcatgcgcaaaacggcagcgatgatttggccattctccagctggccagggtggtggagtccaatccccattttgtgaaggcccatcttcttctggccctgttatatatggccagggaggattttaataaggccgggcgctgcctgtacaagattctccagattgacaagagcaatcagaaagccctgcactacatgtccattgtaaagcagaatacaggcagggcagacgcggagaagcgcaagatggtaaaggcattttcccatcggaagatggaggatgacgatgtcatcatccccaatacttataaggaaaatacgggcatttccactgtgctccacatcatcataggactggtactgggcattatggcattttattttctcattctgccggccagaacaagggaccttaacagcattcatgataacaacctgaaatcctacatgcagaagctcaacaacgcgaatcagcagtacgatattctgaaatcggattatgacgagctggatgcccacacaaaggagattcaggcccgtctggacgagctgaccacaggcaacaccagcgtcattgcccagtaccagggactgatttggattcttcaggattacaggagcggtgatttggtggctgcggccaaggcgtttgccggagccggttttgatttgattgaggacgaaaatatacaggccattgtggaaaatatacgccaggatatgacggcaaatatctatcagagcctggtggacaggggacttcagctgtggaacgcaggcaataagacagaggccatggattatttccaggccagtctgaccataaaaccggataatccggaagctctgttctatgtggggcgtctgtaccaggatgccggcgacacggacaatgccaattccatgtttgacaaagtggtcaatgaattcccggattccgaatatgtggaccgggcaaagaatgccaggggttattaatttaaacggtttttcaggaaagatactacagatgataagaaatatatcttttgtggtatcttttttgtaatttataggcactgagaaaggagtatggagggatggaacagacaacgtttacgtatgaggccagggagcagatgctggtgattcaccttccgaaggagctggaccaccataactgcaggaacctgaaacgggatacggacctgctgctggcagagaattacatcaatcggattgtatttgattttacccacacatcatttatggattcatccggcatcggggtgcttttaaaccgctataagcagatggcggccagccggggaaccgtggcctattacggggcaggaccccaggtcaggcggatactggagatgggcggggtaagccgccttatcaaaggatatgaagacagggaatcagcaataaagggatgaaaaagatggaggataagaagatggagacaaacagagagcatatgaggctggaaatggagagcctttcccggaatgaggagtttgccagggtggtgacggccgtgttcatgagcaggctggaccccaccctggaggaggtggatgatgtaaagacagccgtatccgaggcagtgaccaatgcagtcatacatggctacaggggcggccggggaaccatatatctggacttgaccgcagatttggaggaacgggtcctgactgtggcagtggaggaccgcggtgtgggcatagcggatgtgaaacaggccatggagcccatgttcaccacggatccagagggagagcgctccggcatgggcttttccttcatggaggcatttatggaccaggtagaggtggagtcccaaccaaatcatggcacattggtgacaatgaagaaatccatcggcaggtgacggcgatggatgagaccatgaaattaatcaatatggctcacgcgggggataaagcggcaagggaccagctggtcatggacaatgtgggactcatatggagcattgtcaggcggttctcaggccggggatatgagatggaggatctgttccagattggaagcatcggactgattaaggccattgacaaattcgacacagggtttgacgtgaaattttccacctatgcagtgcccatgattgcaggtgaaatcaaacgctttctcagggatgacggtatgatcaaggtcagccgctccatcaaggaactgggggttaaggtcagggccgccagggaggaaatgacatacagcctgggcagggagcccaccattgaggagatagcaggcagactgggcaccagccgtgaggaggtggcggcgtccctggaggcggcagctgaggtggagtcactgtaccgtccggctgacagcggagatgaaaattccacctatcttatggatcggctggcccaggacaacaatgaccatgaggatttgttaaaccgaatggttttaaaggatttgatggagggacttgaggaagatcagagggaaattatactgcgcagatatttttacaatgagacccagacccagattgccggcgagctgggcatttcacaggtacaggtttcacggctggaaaaacgtatattgaaagaaatgaggaaaaaactgtaaacaaaatccgtaaggtataaaaagttccatggaagtcatactagataccagaaaccaattaacttttcttgaaaaggatgtgattcttatgggttttggtaaacgagtatgtgaactgcttgcagtcatagcctcccttctcctgataggggccctggtatggtatctgtcctcaggtttcggagacaggggatatgaaaaggaagggacgctggtgtgggaggagacggacgagtcttccatggaagaggaagcatgtccggcctttgtgactgaccctgtgtccatgatgttcggacagcaggaaatccaaaggagcggaagaggactatgaaccatacagtctatttaaaactaaatcaaatcacggagctgactcacaaggatgttgtcttaaaggacgtggcccaggtttactgcgacgaccagaatgtgatgaacaaatgcaactccatgaaggtcatgaccgtgaaggtggatgccaagcggcgctatatcatgagcgccctggatgtaatcaataagttaaaacagctggactccaccattgatgtaaacaacgtgggggagacggatttcatcattgcctacaaaccgccttccccgcctgcttacatctggcagtggaccaagaccatatttgtctgcctggtgtgctttttcggcgcagcatttgccatcatgacctttaacaatgacgtcagcgtcaccgatgtgttcagcgaggtgttcaagctggtcatgggctatgagtccggaggttttaccgtgctggaggtaagctactccgtgggtctggccgtgggtatcgtcggtttcttcaaccatttcgcagccataaaactgaatacggaccccacgccgttagaggtggaaatgcgcctttatgaggacaatatcagtaagaccctgattgccaatgacagcagaaaggagtctaaaattgatattacttaaaaaatgtctgctggcgttcttcggtctgtgcgccggcggcatcattgcggccggcgtatacgcgttccttgctattatcggcgtgtttgtgcgtctcatgggaaagaccggtacaaggaagcatatttttctgtatgagacagtgattattctgggcggagtcctgggaaatatactggatatttatgagttccccatttatatggggccctatctgggcaccctgttcatatgtgcgtacggactgtccgttgggattttcgtgggctgtctggtcatgtctctggcagagacactgaaagcccttccggttatcagccggaggattcatctggccgtggggcttcaatatctgatatttgccctggccgcggggaaaatggcgggatctctggtatatttttggaatcatatggcttcccttggatgacggggccaaagatgatgagccaaaaagggtttgggctgtccgcatccggattttgagaggagtaaacaaatggaaattgataagaaaaagtatgaggagtacgtgaaacaggtgactcccacccacagcctggcaaagaacatggctgcggccttcctggtaggcggaatcatctgcgcgctgggacagtttgccctgaatttcatgatgaacaacatgggcatggaccaggagacagccgcggcctggaccctgctggagctgattcttttaagtatcctgctgaccggatttaatatctatccaaagattgtgaagttcgggggagcaggcgcccttgtgccgataacagggtttgccaattccgtggtggctccggccattgagtttcactcggagggcgaggtgttcggcgttggctgtaagatattcaccattgccgggccggtgattttgtatggggttttgaccagctgggtgctggggctgatttactggattgggagattgatggggattttttaaacgcgcatggactgggaaatatttcctggtccatatttttcttttcggaaacatgcagttgacattttatggtttctctgatatattatgctagttagtcatgactaacgaaaagcaaaggagaaagcggcattggcgtgtttcctgaaaaagcacggactcatacaggtgcggtgcaataaggactggggagctgtttagcgcctacgtgctgccgcctccctacagggtattccggagcttttacaagatggctgtgaacggcgaactgtggaaggatatctccatcagctttctcagggtcataaagggattttacattgcttttgcgctggcctttggcctggggatgatacggtttctgctgccggggaccgcgaaatattatgagtacatggtgcggtttttcaggaatgtaccgcctctggccatgattccgctgctgatactgtggtgcgggagaaggctgacagcggggagatacagtatgagggctcccaacgtaccgcctttgtatttcaggaacccaggctgatgccctggcttacggtatgggacaatgtggcctttgggattaggaagaaggagcagaacagtgagaatataagcggtatcatcagcactgtggggttggaagggtttgaaaaggcatacccgttccagctttcagggggaatgcagcagcgggcagccatagccagggcgctggcataccggccatccttcattatgatggacgagccttttgctgccctggattatttcactagggaacagatgcagaaagagcttttgcgggtccggcagaaacagcggtgcagcatcctgtttgtgacccacagcatagatgaggctctgcttctgggacacaagattgtggtcatagaaaacggacttgtaaagacccaggtacgggtgccggagctggaaggagacaggaacctgctggatgagatgttcatttcccttaagcggcatatgattgagagcctgaatacagcagactgagactggaaaatgcggacttgtgatacggcgggggatacataacaagatacatagcagcaatagaaaactggataaatgacagaatagcggcccctgccccggaaggaacatccgccgggcaggcttccggcccggacaaattgacgcttacctatgttgcttcccctcttaacgtgcccactattattgagagggaccagaatatatttgcagatgcatttgaggacatgggaatttcactggagtacgcggaaatcaattcaggagcagaccagacacaggccctggcatcctatcttgccaccggaggcctgactgtagatgatgtggattatgtgaatatgtccattgcggacgcaaaggctgccctggacggcggcagcgtggacgcggccctcattgcaggtgcagccgcttatcaggccaagcagcagggatactatatggtggctgacggggaaggactcataaaagccattattgccgtggctgtcagggaagtttttatgaaaaaaaccgggacgtgattggccgtttcgtggaagcccagaagcgcgttgcggcatttatgaaggataaccaggatgaggcccttcagattgtggcagaggagctggatttggacgaagaagcggtaagggaaatgtatgcctgctatgatttttccatggatgttaccgatgaggataagaaaggctttcagaaaacagctgatttcatgctggaatccggcatgatagaggaagaactgaatgtaaatagtttgtttttgtaaatatccgtgataagcaggctgccttttggttcttttatttttgagtatttttccggaaacgagggatactgtaattattatatcctgtcacaggaaggagagtacatgaaatgggacagatgaaaggcaaggcaagtattgaatttgaacatcccccggtcatcataagtgctggctccgtcgtaggaaaaaaagagggggaaggccctcttggaagcctgttcgacgagatagaactggacgatatgtttggaatggataattgggaacaggcggagagcaccatgcagaagaaaaccgcggatctggtcattgaaaagggcggcatacgaaagggtgatctgcgctatctgtttgcgggcgatctgctggggcagctcatagccacatcctttggcaccgtggatttggagatacctctttttgggctttacggggcctgctccaccatgggggaggcattgggattgggtgcaatggcggtcaacgcgggatatgcggaccaggtcatgtccatggcgtccagccattttgccaccgcggaaaagcagtttcgttttccactggcctatgggaaccagaggccgccctctgccacatggactgttacaggctgcggcgccgtggttctggccggaaaccggaaggatggtatggcccgcatcgcaggcatcacaaccggacgcatggtggacatgggcgccaaggattctatgaatatgggagcagccatggccccggcagcgttccacaccattgaacagaacctggaggatttccaggtcaatgagacctggtatgataaaatcatcacaggggatctgggagaagtgggaaggaccatcctgcttgagtttatgaagaataagggaagggacttaagccagcttcacatggactgcggtatggagatatacgataaggaacagcaggacacccatgctggcggaagcggatgcggctgttccgccgtaaccctgtgttcctacatcctcccaaaggtacaggacggcacctggaagcgggttctgtttgtacccaccggggccctgctgtcctctgtcagcttcaatgaaggacagagcataccgggcattgcccacgcagtcgtcattgaacatatagacagttaaggaggaaatgacatggactatttaaaagcattcatcgtgggaggaattatctgcgccctggtgcagattctgctggaaaagacaaagatgatgccgggacgggttatggtcaccctggtagtcagcggcgccatactgggagccatagggctttatgaaccctttgcgaaatgggcgggggcaggggctaccgtacctcttctgggctttggaaacaccctctggaagggcgtaaaggagggaattggagaggatgggcttctgggcatctttaagggcggattcacagccagttctgcgggaatatgcggcgcattggtattcggctatctggcgtcccttgtgtttaagccgaaaatgaaatgatgaaaatgaatatggaaagcatgaaagtaataaaggcgtcataacaaaaaaccgggacacagctgtcatctgacggctttcgttccggtttttaacatgactttatatctgtcagtactggatttttaaatagtctgctagtaaggccggttccccggaccaaacccttccgtggtttccggcgaggtctggtaacccggaccgataggtgtcacggtaggacctgtatttccgggctcattgatgttgggcggaatgatggtggaaacgtcggagtggacggtgcagtagcccgggatagcaaatacggaatcatccgtagctccctcctcgccctccggcagtgtcatgcataccctggtagtctttgtgggacagtagggagtggggcgcatgcctgattccgcgcatacggtaacctccacatgcttgtcgcagacttccgtgggggcggttcccttagcaaaatactcggtgtagacggcatttcccctggggtcgtggttgcagacaccggagacagccctcttgccggatttgcggcagatttccgcagtctcgatactgtccggcaccgcaaagcccgggtctgacatgccctcgtggacacggttcatgatgttgcgccagatgtccttgtggaagctggttccgccgttgttcacgccgccgtgcttaagcttctggttgttgtcacatccgccccatatgccggcggtgtaataaggcgtatagcccacgaaccatacatcgttgttggaggtggttgtgccgctcttgccggccgcagtcatgcctgtcagggcagcgcgggtactggtggagttgatggacacgcccggccgggtgaatttgcggttgctcttcatggattccgacatggcatccgttaaaaggaaggcagtggaatcctttaacacctgctttgtctccggttcattgtctatgaggacctttccgttgtggtccagtatcttggtgaagaaacggggctttgtgtacacgccgccgttggcaatagcggcataggctgtggtcagctccaggttggaaacgccctttgtgatgccgcccagggcggtggctgctcccaggtcatcctttgtaagggaggtaatgcccatgttttctgcgtactccacgccaagctgtggcgtgactgtctccataaggcagcgcacagccacaatgttcatggagtagatgatgccgtcccggatgctggagtaaccggtaaagccatagccggaattccaccagttcctgaaggtcttggttcctatggtgtagggcgcgtcgtagtagaccgtgcccagggtggcgccgcaggcatccagggcgggcgcgaaggccgtgatgaccttaaaggcggagcctggctggcggtatacgttgctggcgcggttcagggtaagactggctgtcttttcgccgcggccgccgcacagcgccttgacctcgcctgtgtgctgatctaatagaacgaaggaggcctggggctgtaaaatcagattctggcgctctccgatgatttcatcgccatcctttaatagccatgccttatactggtcaatgtcgtcctggaccgcttccttggaggcgtagagtccctcaaaggaggaatctcccagcacgcttttgcggaaggtgcgcaggttctcctctgaatagtgctccgtggtgccgtccgcgtgagtaatggagagcctgtactccacggaatacttggcaacggaatagttgtccgggttattgatctcctcgtccacaatggcctgtaaggcgggatcctgagtggtataaatctgcagtccaccggaatacaggagattgctggcctggctttccgtgtaatccagcttttccatcagggcgtttatgacctgttcaatgagctcgtccgtaaaatagctgtagtggctgttgattcccttggtggctgtatccacgttctgtatcctgtcgtatacatcatcagccagggcttcttcctgctgggccttggtgatataatcctgctcatacatatactggagtacgattctccggcgctccgcattgttttcgcgtcctgatatgggattgagtctggagggattcttggtgatggatgcaagcacggtacactcggagagagtcaggtcggaaacgtccttgttgaaatagcgtttggccgccacctttactcccagggtgttgttgcccaggttgatggtgttgagatagttggtgataatcagcttcttggtatcttccttgctcatgcctgaattcttttccagctgcacggcaaggtactgctcctgcagtttacgctcaatcctggcaccccagccggattccattcctccggagaacacgttgttcttgatgagctgctgtgttatggtgcttccgccgcccgcatagtcgtcgctgacaatgcccttaacggccctggcaatggaacggatgtcgatgccgttgtgggtccagaaacgggaatcctcaatggctacgaatgcgtttaccaaatcctttggaagttcatcgtaggtggcttcctcgcggttggaaccgctggtgaccagggtatccgtcaggttcccggcggagtcgtatactgcggtggcaaaacggctgggctgaatatttagaatatcaacggaaggggcattatctataatgcctttaaccataccgaaaccgatggaggcgcccactactgccagaaacaaaaacaggacaaaaagcgccttaaatatattaaggagcagccttgaagcgtatttgcccgatttagagtggagagacttaagcctgcgctcagcctcgtactttccatagttcatagattctccttttcgtacataatctgaatggaatccgcccccctgcggacccttatacctatcttgtagattatacaccagttttgtaaaattgaaaaggtttaaatatgcccttgccatcgcctgatatctatattatgataaaagataggtaaaaaatgtcgaaaggtggggatggtaacccacaaataaccgtaaaggagccgtaaaagtggtagatagttacaaaattctgtacaagggaggatcaggagagctggtggagaagaagtcgcgcttcatagcggacctgcgcccggtggcttcagaggaggaagccctggaatttatagaggaaattagaaagaaatactgggatgcaagacatcactgttttgcctatattataggagacaggggacagtccgcacggtgcagcgacgacggggagccgtcccagacagccgggaaacccatgatggatgtgctggcaggggaggagctccacgatgtgtgtgccgttgtaactcggtatttcggaggcaccctgctgggtacggggggactggtgcgggcgtattccggtgctgtcaaggaaggaattaagaactgtgtcatcctggagaaaaagctggctgtccgtctgaacatcaccactgattacagcggggtgggcaagattcaatacattgcggcccagggagggatcgacaccctggatacccagtatacggataaggccgtgtttaccttcctggttcccatagcggaggagggaagatttacggcccagattacggagggaacggcaggaaaggctgtcatacagaaagtggatgaggtttactacggccttggcgacagcggtctggtggtgttttaggaggaggaatgtgataatggagatggaaatgaaaaaactgggatttggaaccatgaggcttcccgtgttaaatcaggaggacccggcggcggtggatttggagcagctgcagctgaattacatagactgggacagccccaatatccagtcccgccagtgctgcgaggtgtgccgcagatacgggaaggatgtcatagtcatggagccggtcaagggagggaccctggctgatgtgccccggtaggccagggacctgatggaggcccatgctccgggcatgacgcctgcgtcctgggctgtccgctttgccgccagccgtgagggcgtcattatggtgctgtcaggcatgtcggattacagccagctcctggacaacacagcctatatgcaggactttgttcccctgactgaaaagccggggactgcatcggctgccgcagatgcgaggccatatgcccgcagcacctgcccgtggtacagcacatgaaggaaatagcagaggtgtttgagccggccaaatagggcgccgggatagggaaaaacagcggcaatcagcggaaatggtgtaaaatcccttgcaatctcaacacaccaatgctatactataaaaccgtggctgtagacgtatataataaggaagagtaatcactatgaagatgaaaagagaagatgtaagaaatatcgctatcattgcccatgtagaccatggtaagaccacattagtagaccagctgctgaggcagagcggcgtgttccgcgcgaaccaggaggtacaggagcgtgttatggactccaatgacctggagcgtgagagaggaatcaccatcctgtccaagaacacggctgtattttataaagacacaaaaatcaacatcatcgacacgccagggcacgctgatttcggcggggaggtggagcgcgtgctaaagatggtggacggcgttgtgctggtagtggatgcctatgagggacccatgccccagacaaagttcgtgcttcagaaggcgctggatctgaacctgtccgtcattgtatgcatcaacaagattgacaggcctgaggccagacccgcggatgtcattgacgagacgctggagctgatgatggacctggatgcaacggacgagcagttagactgcccctttatctacgcatctgccaggggcggattcgcaaaatacaagattgaagacccggaagtggacatgagccctctgtttgagaccatcataaaccatatcccggctccggagggagatccggacgcggagactcaggtactcataagcaccattgactacaatgaattcgtaggccggatcggcatcggacgtgtggacaacgggggacttaaggtgaaccaggagtgtgttctggtgaatcatcacgagccggataagtttaagaaaatcaagataggaaagctctatgagtttgacggacttaagagggtggaggtgcaggaggccggtattggttccattgttgccatctccggtattgcggatatccatatcggcgataccatctgtacccctaataatccggagtccattccgttccagaagatatctgagcccactattgccatgtatttcatggtaaatgacagcccgctggcaggccaggagggtaaatttatcacctcccgccatctgcgtgaccgtctgttcagggagctgaacacggatgtaagcctgcgggtggaggagacggattccgcagactgcttcaaggtgtccggccgcggtgagctgcacctgtccgttctgattgaaaacatgcgccgcgagggctttgagtttgctgtcagcaaggcggaggtgctctacaaatacgatgagagaaaccgcaggctggagcccatggagctggcttatgtggatgtgcctgaggaatacacaggcgtcgtcatccagaagctgaccagccgcaagggcgcccttcagggtatgagccaggcggcaggcggctattccaggctggaattctccattccatccagaggactcatcggctaccgcggtgatttcctgacagatacaaagggaaatggtatactgaacactatttttgacggatacgcagagtacaagggcgatttgttctaccgtcagaccggctcccttattgcctttgaggcaggcgaggccattacctacggtcttttcaatgcccaggaaagaggtaccctgttcataggaccgggcgtcaaggtgtactccggaatggtagtgggccagagccctaaggcagaggacattgaaatcaatgtctgcaagacaaagaagctgaccaacacccgttcctccagcgctgacgaggcacttaagctgacacctcctaaaattatgagcctggagcaggctctggacttcattgatacggatgagcttctggaggtgactccggagagtctgcgcatccgcaagaagattctggacccaaccctgagaaagagggcttcttttaagaacaaatagataaaaatcgacattttgtaagcgaaatggcgaatcctgtcgaacgattctggcgggattcgccttattttttgttctattatggcatttcccctcataaactatcaatgtgccgtacaaaagcaagagaataaaaggatgaaacaagtaaaacggcagaatgagaaatattttagaagcgaagaggagatgtactatgtcagaaaaaatgattgaaaacaacagggtaagcgtcatcggagaaatcgtgtcgggatttaccttcagccatgaagtcttcggagaaggattttatatggtggatgtggctgtcaacagactcagcgagcaggcggacatcattcccctgatgatatccgagcgcctcatagacgtacataaagactattcaggctgcaccgtggaatccataggccagttccgttcctacaaccggcatgagggagtcaagaaccggctgatgctgtccatctttgtgagggaaatccatttcattgaggaattcacggattacaccaagaccaatcagatattcctggacggctatatctgcaagccgcctatttacagaaaaactcctcttggacgggagatcgcagatattcttctggctgtgaaccgtccttacggcaaatcagattacataccctgcatcagctggggacgcaacgcgcgctttgcttccagcttcgaggtgggcaccagggtaagggtttggggccgtgtgcagagccgcgagtacaccaagaagctcagcgagacagagtgcgagaagcgcattgcatatgaagtctcaatcagcaagctggaatgtgacgaggcttgaacagaagatgctacggacgctgtcatctgacgattccttttgaatatcttttgaaaaatgtaagaaatatttgcaatattggctaaactatgctattatgagcaagtccaattgttcttaagaaaaagcaagtaaagcatgaggtgcaagatgatgaaagagagcatgatacaggttatctgtggaccgggacgcggtaagaccaccagtgccattggaagggggctcaccgcgctgaccaagggaaagtgtgtctatatggtacagttccttaagggcgccctggatgcggataacatggaaatcatacagcgtctggaaccggaatttaaaatgttcagatttgagaagacgcctgttttctttgaccggctgacggaagaggagaaggcagaggcaagaatctgtatcctgaacggcctgaattttgccaggaaggttctggtgacaggggagtgtgatgtgcttatcctggatgagattctgggaatcctggacgagggagtgatatctggcgaggagctgtgcgccatcatagcccaggccaggaatgcgcagatacagctgatcctcacagggaccatatatcctgagtgcctgaacggccatgtagatgaggtcacaaggattcagacaagatatgagtgatttcctgttgacagactgttggcagggtgataatataataccaacaatcatagagtagaggttgcgttaatcatgagtagataagccggatgtggcaggcacaggcgatggcttagggaaagggagaaacgccgaagaggaagcgttccttgttcacgccccctctgggcatatggttaagagccgtatgactgtcatccgggtggatggagagctaccaaagaacgtggattagacactggaatcatacgtatatggaagggctgacatttacctcagcccttttttgtttccaagaaaagtacgtccgggtttcattttctatggggaaaagcacactgtgattgaatcaagaaaaaaggagagaatatagcatggcactttttgaaggagcaggtgtagcactggtgaccccgtttaaggaaaacggtgaagtgaattacgaaaaactggaggagattgtagaagagcagattgcgggcggcacggactccattattgcctgcggtaccacaggcgaagcctccaccatgacccatgaggagcatctggatgtgattgagtacatctgcagggtgacaaaaaaacggattcctgtggttgcagggaccggctcaaactgtacggagacagccgtctatctctccgcggaggcagagaagagaggggcggacggacttcttctggtgtcaccatattataataaggctacccagaaggggcttatggcccattttacggctgttgcggacgcggtgaagattcccgttatcctctataacattccgggcaggacaggcgtcaccattaagcctgagaccattgcggccctgtgtaaggacgtggataatattgtgggggttaaggaggccagcggcaacttttcagccattgccactcttatgagtctgtcagacggcaaggtggatttgtactcaggcaacgatgaccagattgtgccccttctctccctgggaggcaagggggttatctccgtgctgtccaatgtggctccgcgccagacccatgacatctgcgcttcctactttgcggggaatgtaaaaaccagcgccagccttcagttaaaggccataccgctgattacggagctctttagcgaggtaaaccccatccctgtaaaggctgccatgaacatgatgggcaagggcgtgggaccgttacgcatgcctttgactgagatggagccccagaatcaggagaagcttaagagggccatggcggattacggtatcctgtagggaagattccgggaaaggacggtataccaatggtaaagatgataatgcacggctgccgcggggccatgggacatgtaattacaggtctggcggcagaagacgaagatatccggattgttgcaggcatcgatgtgcgggagggaacggatttgggatatcctgtgttcccttccctggaccagtgcagcgtgaaggcggacgtgattgtggatttcgcatccccaaaggcagtggacggcctcctggcctacagctgcagagagcaggttcccgtggtcctctgtaccacagggctctcgaaggagcagcttaagtcagtggaaaaggccagcgaaaagacggctatcctgcgctccgccaacatgtccctgggagtaaacctgctgctcaagctggtgggcgacgcggccagggtactggcaggatccggctttgacatggaaatcgtggaaaagcaccataaccagaaggtggatgcacccagcggcacagccctggccctggcagattccatgaaccaggccatggacgggcagtacgcctatacctgtgacagaagcaccagacgggaaaagagaaatccgaaggaaataggaatttcgtccgtcagaggcggttccatagtgggtgaacacgacgtgatatttgcgggtagggacgaggtggtcaccttcagccacacggcttattccaaggctattttcgccaaaggcgccctggaggcagccaaattcctggccggtaaggcgcccggcatgtattccatgacggacgtagtgagattataacaaatatttccagaaaaggcaggatgttccaccataatccattctcctaaagcacataatataggtagaaaacgaaaggagaatgtcattatgaaaaaaatcagacctgcaatttttgcaatgctgctgctcatcatggttatgtctgttacggcctgtggaagcaataactccaatacacagtcctcaacaggcgccagccagaattcatcttcagcagccacatccaccagtacctcatcccaggaaaccacagggatggagacatcttccatggaaacggaaggggacggcatcattgacggacttatgaatgacgtggataagggcgcacgtgacgttaaggacggcgtgaacgatatcacaggcgaatccaacacagtcaatgagagcggcaccaacaatacaacagagtccagatagtaaattgctgtccgggcctggatatggaccctttctatgccgggtacggctggagagggtctatctgtgtaaaaaccagaagatgccccttgaagagctcccttcaaaggattataatcagttcatggacaaacggggaaggagatggattggggtacataatcagacgtttcagactggtggatatggggaagataagcctgagaaagatgtgtttcaggaagatgttcctgagggtgatgtgtctgaggaagaatgggcagagaaagaagggattgagaaagatgcgccggagggcggtgaaatcctggaaagcgcgctgtccgtccatcagacgaaggaggcgctgcgtcagaggcgccctgtttcttttggccgcaggtaccatggcctgggcgggaacgggccggggcattgtccgctgggtccgggagcagataccgcatatggtacggattgaggagagcagtccggcccgggcggcagaccgggatgggatgacatcggtgaagcggggctttaccattcgcctggatgaaaggaaaatccacatataccaggtggaggaaggatatgaggaccgtgaaaggtccggcgattcagggagtgattagcggggcggagtacattcattaggaattttaatgattgccacgcttgtattcaaagacattgtgtattataatttcttctgaaatggtattcttttatagcgtcagcttataaatccatatcgcaaccatacgaatattagaaaaggacaggtggatacccatggaaaagaaagagatgctctacgaaggaaaggctaagaaggtttacacaacggaggacccggacgtgttaatcgtgtcctacaaggatgatgcaaccgcattcaacggtctgaaaaagggaaccattgttggaaagggcgccatcaacaaccgtatgaccaatttcattttcaaaaagctggaggataagggtgtacctacccacctggtagaagaattaaatgacagggaaaccgctgtgaagaaggtggagattgttcccctggaggtaatcatccgcaattattccgcaggcagctttgccaagaagatgggaatggaggaaggcgtcaagtttaaatgcccgactctggaattcagctataagaacgacgaactgggcgacccgtttatcaacagctattacgcactggcactgggacttgccacccaggaggagattgaccatatcactgagtatgcgtttaaggtaaacgaagtgctgcaggaatattttgacggactgaacattgacctgattgatttcaagattgagttcggccgttatcacggcaaggttatcctggctgacgagatttctcctgatacatgccggctctgggataaggatacccatgagaagctggataaggacagattcagaagagatctgggcaatgtagaggatgcatacgaagaagtattccgcaggctgggtatccagtaagcaggaccgggaggtttgacgcggacaaattaagatacaacgcctgggcatgaatacccgggcgttcccttctttgagaagggaatatggaatcagtaccgcattgttatcgttgcagcgcggtatgaaactggcagcttgacacacagaaaggacatgacttcatggatcagaaccggatggattttgatattggggcagataaactgcgtgaggagtgcggggtttttgggatgtatgattttgatgggaacgacgtggcccgggccatatactacgggctttttgccctgcagcaccggggacaggaaagctgcggtatagcggtgagcgacacagaaggacccaaggggagggtagcggcccataaggggatgggcctttgcaacgaggtatttacgccggaggcgctggagagtctgaagggcaatatcggcgtgggccatgtgcggtattccacggccggcagcagtacccgggaaaacgcgcagcctttggtgctcaattatgtaaaaggaaccctgggtctggcccacaacggcaacctggtcaatgcgcctgagctgcgccatgagctggagtacacaggggctattttccagactaccattgactcggaggtcattgcctaccatatagccagggccaggattcataccccaaatgtggagagcgcagtggccgcagccatgaagaagctgaagggagcctactccctggtaatcatgagtccccgcaagctgattggagcgagagaccccatgggcttcaagcctttgtgtatcgggaaacgggataatgcctacatcctggcgtcagagacatgcgccctggagaccataggggctgagtttgtccgggatgtggagccgggggaaatcgtgaccatcacggcggacggcatatcctctgataaggagatgtgcctggctgacccttccggagaagccagatgtatctttgagtatatttattttgccagaccggacagtgtttttgacggagtgagcgtttataaggccaggattcaggccggccggttcctggctgtggattcaccggtggaggcagacctggtggtgggcgtgcctgaatccggcaatgcggcggctctgggctatgccatggaatccgggattccatacggaacagcttttgtgaagaattcctacgtgggaaggaccttcatcaagccaaagcagagcagcagggaatctgcggtgcgaatcaaactcaatgtgttaaaggaggctgtggccggaaaaagggtcatcatgattgacgactccattgtccggggaaccaccagcgctctgattgtgaagatgctgcgcgacgcgggcgccagggaggtccatgtgagaatcagcgcaccgccatttttacacccctgctattttggcacggacattccatcggaggaccagctcattgcccatggaaggactgtggatgaagtgagggaaatcatcggggcagacaccctttcctttttaaggcaggagcggctgtcacagatggcatctgaaaggcctgtctgcaccgcgtgctttacagggaattatcctatggagccgccttcccaggacatccggggcagctatgagaaataggccgcgggcatttaaaaaagttattgtatatgatatgatagaaaacatgaaatcaacgaatacggaggatatgacatgagtgaccacgacagatatgtaagccctctttctgagcgctatgccagcagggagatgcagtacatcttttcacctgacatgaagttctgcacctggagaaagctctggattgcgctggctgagacagagaaggagctggggctttccatcacggacgagcagattgaggaactgaaggcccattcagaggaaatcaattatgatgtggctaaggccagggagaaggaagtccgccatgatgtcatgagccatgtctatgcttacggcgtacaatgccctaaggcaaagggaattatccatttgggggccacctcctgttacgtgggagataatacggacattatcatcatgaccgaggccctgaagctggtgaggaagaaactgatcaacgtacttgcggagctgtccggtttcgctgaaacatacaaggaccttcccacccttgcgtttacccacttccagccggcccagccaaccacggttggtaagcgcgccaccctgtggatgatggagcttaagctggatttggatgacctggattacctgatcggttccatgcgccttctgggttccaagggaaccaccggcacccaggccagcttcctggagctttttgacggggaccatgagaaatgccgccgtctggatgcaagaattgcggagaagatgggatttgtgggctgctatccggtatccggccagacctattcacgaaaagtggacagccgtgtcataagcgtcctggcaggcattgcccagagcgctcacaagttttccaatgacatccgtcttctgcagcatctgaaggaagtggaggagccatttgagaagaagcaaatcggttcatccgccatggcctataagaggaatcccatgcgcagcgagcgcattgcctccctggccaattatgtgatgagcgatatgatgaatcccatgctggtggcgtccacccagtggtttgagagaaccctggacgactctgccaacaagagactgtccgtgccggaaggcttcctggcagtggacggcatcttagacctgtacctgaacgtggtggacggcctggtggtatatcctaaggtcattgaaaagcacctgatggcagagcttcccttcatggccacagagaatatcatgatggacgcggtaaaggcagggggcgatcgtcaggaactccatgagcggattcgcgagctgtccatggaggcaggaaagaacgtaaaggaaaagggcctggataacaacctcctggaactgatagcagctgacccggtctttaatctttccctggatgaactgaaaaagaccatggatccgtcccgctatgtcgggcgttctcctaagcaggtggaggaattcctggaagaggtcattaagccgctgcttgaggaaaacgcgggagagctgggagtgacggcggagatttctatataataaacatattccataaccttgccatggcaagaatcctgccttgcaatccccctattttatgttatgatatatccataagaattgattttgattatatcatcttttgataaggggaaattatggatgaatgtgaactttgagtactataaagtattttaccatgtatgcgcccacggcagcctgaccgctgccgcccaggaactgtgtatctcccagccggctgtaagccaggctgtgcggcagttggaaaaggaagccgggacaaagctgttcctccgtacttccaaaggggtgcagctgacccgggaaggagagcttctataccactatgtaaagcctggagtggaggagctgctggaaggcgggaagatgctggagcggatgctgaatatggatgtgggggaagtacggattggggccagcgatatgacgctgcagttttatcttcttccttatctggaacagtttcaccgggaatatcctaagattaaggtgaatgttaccaatgcgcctaccccggaaaccatcaaaagcctggaagagggcaggatcgattttggggttgtgacctctccctttaccagcagggggactgtcaggcagtttcaggtcaaggccattcgcaatgttttcatagcaggcagcagcttccgggaattggaagggcgggagctggagtacaaggagctggaggcttttccgtgtatagcgctggaaaagaatacaagtaccagaacctttatggacgcctttctggcgcagcaggggactctgcttaagccggaatttgagctggccatcagcgatatgattgtgcagtttgccaggcgcaacatggggattgggtgcgtcatggagggatttgccgaggatgccataatgagaggcgaggtattccggctgaaattcaaacaagagatgcctcttaggcatatgtgcgtggtgacgggagagtccagcctgatttccatgccggggcgcaggctgttagatatgatggcctgcggtcaggcggcggttgagcagccgacaggcggcagatgatagattatgggctttcttcggaggaaagacataaacaatgcttatggagaacataataaagaacgtctttacttatggtataggttgtagtaaattaggtaaggataagatacacaggaatgcgtgtccatcctttcatgaactgcaaatgagcattgaacgggagatacccgaaggaggattttagtatggtcagagcaattgtaggtgctaactggggtgacgagggaaagggtaagattacggatatgcttgccaaggagtctgacattatcatccgtttccagggcggaagtaatgcgggccacaccattatcaatgattatggcaagtttgcccttcaccttcttccatcaggcgtgttttatcagcatacaaccagcatcattggcaatggagtggctctcaatatcccttatctgattcaggaaattgagtcgctggtggagcggggcgtgccaaagcccagaatcctggtttccgacagggctcagattctcatgccgtaccatgtgctgtttgacacctacgaggaagcgcgtctggccggaaaatcctttggttccaccaagtccggtattgctcccttttattcagataaatatgccaagattggtttccagatcagcgaactttttgacgaggatctgctgagggaaaaggcatgcagggtttgcgagctgaaaaatgtgcttctggaacacctgtaccataaacctcttctggatcctgaggaaatcattaaggagcttctcagctgccgtgatatgattgcgccgtatgtatgcgatacatccgcttatcttcatgaggccatcaaggaaggaaagaatatcctcttagagggtcagctgggctcccttaaggaccctgatcatggaatttatcccatggtcacatcttcttccacgctggctgcctatggagccatcggcgcaggcattcctccgtatgagattaaggatatcacgacggttgtaaaagcttattccagtgcagtgggcgccggtgcctttgtcagtgagatatttggggacgaggcggatgaactgagaaaccggggaggcgacggcggagagtacggcgccaccacgggaaggcccagacgcgtgggctggttcgatgcggtggctaccagatacggatgccggattcaggggaccacggaagtggcatttacagtgctggatgtgctgggctatctggacgagataccggtatgcgttggttatgagattgacggacaggtcaccagggaattcccgactacgtctaagcttgagaaggccagaccggtccttaccagactgcccggctggaaatgcggtatccgcggcattaagcggtaccaggatcttccggagaattgccgcaaatacattgaattcgtggagaaggaaattgaagctcctatttcaatggtatccaacggaccgggaagagacgacattatcatgcgcaagtaaatatggaatattaaaaacaggaccatacggcagcagccggcgggtcctgttttgcgtcatcttatcctcacatcgtcgtcatatctctgcgttctgtgtgttgaatgcgttccgccgcattctgcatgggcggattttcggtcagcacacggtatatttccctctggttcatgctggagcggtgcttttccatagcgctcctgctttccctcgtcacaattcatctttcaaatccgcgtcagttgtatccgaaagggtctgttttgcgtcatcatccatgccctcaaagggatcggatggtttcagcactctggtcataagccccatggcgtacagtatgatggggataaacaccagggagaagataaccgccatgagataattctttggcgcgcccatggcggccagcacgatggccagaataaaaagtcctgataacaggacggctcctaagagggcaaatatacgtttcagtttcattgaacagctcctttctgaggcatcaggccttctccgccaattcttcccatctctggtaaagcttttccagcagtccggctatttcctctttttccttattcagctccatgagccggggcacatcggtgtatacttcttcccgtgtgagcagggcgtcaatctcgctgtccctggtctctagggagtgaatggaatcctctgtttttttgagctcgttctgaatcctgcgtatgcgggcctgttcctccttctgagccttccattccagtttcaggtcgttttgggaaccctgggagggccggcctgaggcttgggagagattgggtacagaggacgtacgcttgttcctggccgcaaatgcggcttccacagcatcctttttctccagataatagtcgtagctgccgatgtaattaatcagggactgtccggtcaaatccaaaattctggtggctgtgcggttgatgaaataccggtcgtgggacacatagagtacggttccggtgtagcggcacagggcgctttccaggatttccttggaggtgatgtccaggtggttggttggctcgtctaacaacaggaaattggcgtcggaaagcatcagcttggccagggaaacgcgtccgcgctcaccgccgcttagatcgcggattaatttgaacacatcatcccctgtaaagagaaaggacgccagggtgttgcggatctgggtattgttcatgttgggataggtgtcctggatttcgtcaaacagggtcttatccatatgaagaacctggtgttcctggtcgtagtagccgatgtgcaccttggagcccagacgtatctcgccggcatcggcggacagcagctgattgatgattttaaggagagtggtcttgccggtgccattgctgccgatgatggccacccgctccccgcgtttgatttcaaaatttacgtccgtaaacaaagtctggctgtcaaaggacttgctcagaccggtgacggtaagcacatccttgccgctttccacatccggctccagccggatgtccatggagtcgtcgatatccatgggcttttccagccggtcaatcttttccagcatcttttcccggctctcggccctgcggatggatttttcccggttaaaggatttaagtttggcaataaccgcctcctggtgcctgatttcctgctgctgatttaagtatgcccggattctggcgtcacggagcatggcttttttgtcgctgtaggcagtgtaattgccgctgaatacggttccggttccattgtccagctccacgatttttgtcaccacccggtccagaaaataacggtcatgggcaacgatgattacgctgccgctgtaagtcttaaggtatgtctccagccaggcaatggattccatgtccaggtggttggtaggctcgtcaaggagcaggatatcaggtttggtcagcaggagcttgcccagggacacgcgggttttctggccgccggacagggcgttgatgggctttgaaaattcctcctcggcaaagccaagaccctttaaaacgccggtaatttcgctgcggcaggcatagccgccctccaactcaaactggtgggtcaggcggctgtattcctccagcatggcttccaggctctcgccggacgcgcttttcatgtccagttccagggtacggatgcgttcttccatctgaaggatgggccgcttgacctccagcagggcgtcgtggatggtgctctcgctgttcaggtcctggtgctgggccaggtagccgatggaggctcccctccccagcgccacgcacccctcgtcggaggccagttccccgatgatgattttaaggagggtggacttgccggcgccgttgattccgacgatggctgccttttcatggtcttccaggtggaaggaaacctgctttaatatatgtttctctccaaatgatttgcttatattgctgcatgataaaatcatggtaaactcctttaaaaacgacatatttagctctcccaagtataatatacgaggacgattttttcaagaacatatgtaaacgtgtttgacatttttttgacgtctgtttataatggaactattagagttttgacagaactgcacaatgggaaggtggatacatcatggaacgcaaggagatttcgaaggcagtgatttctaggctgccccgttattaccgttatttaggtgaattaatagaggaaggtgtggagcgtatatcttccaatgagctgagctccagaatgaaagtgaccgcatctcagatccgtcaggatctgaataatttcggcggattcggccagcagggatacggctataatgtaaagtacctctattcggaaatcgccaagatacttgggattgacagacagcacaatgtgatcatcatcggagcaggaaacctgggacaggcgattgccaattatacgaattttgagcgcaggggctttgttatcaggggaatgtttgatattaaccccaaactgatcgggctggtcatcaggggaattgagattcgctccgtggatgatttggagacgtttatcagggagaatgagattcagattgctgctctgaccatcccgaagacaaaggcgccggagattgcggaccgcctggtaaacgcgggaatcagggctatctggaattttgctcacacggatttggtggtaccggaggacgtggtggtggagaacgtacacctgtccgagagcctgatgcgtctttcctaccgggtcagcagcatgtacgacctgcaggaggagaaaaagaatgcgttaaagtaaatgtttaggaagacagcaccatgatacttggagttggaacagatttagttgaaatcagacgcatggaaagagcctgtaaaaaggattattttgtggtgcgcacatttacggatatggaaagccggcaagcaaaggggtccgcctctaagctggccggctcttttgctgtgaaggaagcggttgcaaaggccctgggaacggggtttcggaccttcatgcccatcgacgtggaggtgctcagggacgatgtgggaaaaccctatgtccgcctttacagaggcgccctggcccggtttcaggagatggggatggaacgcctggaggtgtccatcaccaatacaagggagtatgccatggcgtttgcggtgggagaaggaaggataaaggaggtacagtcatatgaggatgctggtaacgggaaaacagatgaaagccattgatgcatacaccatccataccataggtgttccgtccctggtcctgatggagcgggcagctcttaaggtggcccaggcagcggagcgtctgtggaaaaaaggggatacaatctgggcagtgtgcggcaccggcaataacggggccgacggcgtggcggcagccaggatgcttcatttaaaaggatatccggtgcgggtatttctggtgggaaatccggataagggaacagaggaattcaggacgcagcttaccattgcaggcaatgtgggtctttcctccctgccctggcaggaaggggagaaggaggaatgcggccttctcatagacgcggtgttcggcgtgggactgagccgccctgttgagggggagtacaggcagtgtattaagatgctgggggccaagtccatccgcagtaccgttgcggtggatgtgccgtcaggcatccacggggatacggggactgtcatgggtattgccctgagggcggatttgaccgttacctttggatgggagaaaaccgggacagccctgtatccgggccgggagtacgcgggccgggtggaagtggctgatatcggatttcccggacaggctctggatgcggtgaaggaagcggaagggacggcggcaggtgattttgccgtcacctacggggatgatgatttgaaacggattcccaggcggcctgcctattccaacaagggaacctttggtaaggtgctgattgtggcagggtccaggaatatgtgcggggccgcttacctgagcgccttatccgcatacaggacaggggcgggactggtaaaactgcttacggtggaggaaaaccggcagattctccaggaacgcctgcctgaggccattgtagccacctacactccggaccagctcatggagggcagggatgaattcaggaagatgatagaagcccagatggaatgggctgacgtggtggtactgggaccgggactgggaaacggaccctatgtggaatacctggtggaggatatactgaccagcgcgttcgtgcctgtcatcattgacgcggacggcctgaacgccatagcgggtcatccgtaccttacctcttactatacggagaatattatcgtgacgccccatctgggggaaatggcccggctcacaggggagtccgtggatcagattaaggagaacctggcagccacggccctggagtatgcaggccgttacggcctcacctgtgtgttaaaggacgcggccactgtcaccgccggacgggacgggaacctgtacatcaattccagcggcaacagcgccatggcaaaggcaggctccggcgacgtgctcacggggatcatagcaggcctgatagccattggcatggatgaggaggaggctgcctgtctgggtgtatatcttcacggccgggcaggggacgcggctgcctctaaaagcggcgcccacagcctgctggcttcggaactggcggatgccgtcggcagtgtgatgaccatggtgtaagggctgtcccgccgcgccaatcacataaaatacaattgagaccgggccgtgataagggcccgtgacacaggaggcaacaacaatgaattcttacagcagagtttacgcagccattgacctggatgcggtggaatccaatatgagggcaatgaaggacagccttcctccttccacttccatgataggggtggtaaaggccgacgggtacggacacggggcggttccggtggccagaaccattgagccttatgtggaagggtatgcggtggcagccattgacgaggcggttattctgcgccgccacggcatccagaaaatgattctggtactgggggtgacccatgagagccgttttggggatttggtccggtacgatatacgccccgccatgttccgctatgaggaggccggaaaattatcagaagcagctgtaaaaaacggcgccagggcaaacatccatctggcggtggatacgggcatgagccggattggaatgacgccggatgaggcgtcggcggacgaggcggccaggatagccaggcttcccggaatccgcatcgagggtatgtttacccattttgccagggcagacgaggcggataaggcattttatgaggcgcagtataagaaatacagggatttctgtgaaatgctccacagcaggggcgtggatatcccgatccgccactgctccaacagcgccggcatcgtggaggggctggactccaacggactggatatggtgcgtgccggaatctccatttacggcctgtacccctcagacgaggtggtccgggacagggtgaagctggttcctgccatggagcttaagagctttatcacatacataaagaccattgaaccaggtacgtccgtgagctatggcggcacctttgtggcggaccgtcccacgcgtgtggccaccattcctgtgggatacggggacggttatccgcgaaacctctccaacaagggcgcggtgctcatacggggaaaacgggccgggatccttggaaggatatgcatggaccagtttatggcagatgtcacggacatcccggaggcggcggaaggcgaccaggtgaccctgattggaaaggatggggaggaatgtatcacggtggaggaactggcccgtgtgggcggcggtttccactatgaaatcatctgcggaatcggaaaacgggttcccagagtctacctgcgggacgggaaggccattgggcaaaaggattactttaacgatatttacgagggctttggatatatgtaaaagcctaccaggctcaaagagaacgtctgaatcatatgttagtagtgtggcgtaaagccggccggatgccccggtgtatccgggttatgtatacacaggtcaaaaatgtcaatactaaggttgaataaattgacggagtgtgaacgatgtgattatcagacgtggagatatttattatgcggatttgcggccggtggtgggatcggaacaggggggagtgcgccctgtgctgattattcagaatgacgtgggaaacaagcacagccccacggtcatatgtgcggctattacttccaggatgaacaaagccaagctgcccacccatgtggagctgcccaccagacgctgtgccatgattaaggattcggtcattctcctggaacagctgcggaccattgacaaacagagactgaaggagaaaatctgtcatattgatgaggaactgcagcagaaggtggatgaggcccttatgattagcctggaactgcgtacataagcaggcgggggcaccatgggcaggaatcatgggcaggagcaacaggcaccattgacgaaatatgagaaaaatgatatgataagcagagttatgccgtattttagggggatagctctgttttttttggcagggcccgacggttatggtgtttcatgagtatgaaaggagtctttttgtcattatggacgatggttatccacctgtcagtatcctcatattgataggatttattcttctggaggcaatgttttacggttttggttcggcaatacagaatgtgaatgaggggaagctggaagaagaggcggccggggggaataaaaaggccgcgcgcctgttagagatagtgaaccgtcccgtgcggtttgtccataccatccaggtcactacccatctgatgggtatgattataggagcggcaatccttcctgccatgattggtatggtggagcgcaggttccttctgggaaaggtgctggcctgggcagaaccggcccagttgatggcgatgtcgggtacgccgtggtacaggaatccgtcctggtggcagtgggcgggggttctggccctggtcaccgtatttgtcctggtgctggtcatcagcttcggcatcatcataccgaaacgtctggcggccaaggagcctgaaaagtggggataccatatgcttccggttgtgctctttttcgcgggggtatttctgcccctgacacgcctgattacgttgatttcttccctggtgcttaagccctttggggtggacctggcggatgacgacggcaacgtcacagaggaggatatcatgtctatggtcaatgagggccatgaacagggcgtcctggaagcggatgagacagagatgataaccaatatctttgagctgggggacaaggaagccgcggatatcatgacgcaccgcaccaacatgacggccctggacggcagcatgagccttaaggaagcagtggatttcatcctgaatgagggcgtaaatacccggtatcctgtatacggggaggacatagatgatatcatcggcatactccacatgcgcgatgccatggcctttgcggaaaaggaagagaacagggacaggatgattaaggacatacccggccttttgagggaagccaatttcatacctgagacaaggaacatagacacccttttcaaggagatgcagtcccgcaagatccacatggaaatcgtggtggacgagtacggacagactgccggtcttctcaccatggaggatatactggaagaaatcgtgggcaacatcatggatgaatacgatgaggaagaggatttcatacaggccatggaggatggcacctttgtcatgagcggtcttacgccgttggaagatgtgatggagaccctggatattgaactgccggaggaggacagtgacacctatgacaccctgaacggatatctggtctcgcggctggatcgcatccctcaggaaggggagaatccccaggtggaattcggcggctggctctttgaagtggagcgggccggtaataagatgatagagagcgtccgggtcgttcctgtgccggaaggcgggaaggctgcggacagcgggaaagaatcggtggaagagaagtatgatgcagttaatagagagtacgaaggagatgtttcgtgacagcagatttttaaggaaggcgcttatgattgcctgtcccgtggctctgcagggaatgcttaacacagtggtaaacctggcggataccctgatgattggcaccatgggggccacagccatagcggcagtgggactggccaataagttcttctttgttttttcgcttctggtattcggaattgtcagcggaagcggcgtactggcggcccagttctggggaaacggcgatttaaggagcatacggaaggtcctggggctttccatccttctggccctgacaggggccttgttcttcgttgtgccggcccttatgtcaccccaatccgtcatgcgcatatttaccaccagccatgacagcgtggagctgggggcaaagtatttaaagatagcggttttaacctacccctttcttgccatgaccaatgtatatgtggccatactcagggcggtgaacaaggttatattccctgtcataagcagctgtatagccattttgattaatatctgcctgaattatgtgctgattttcggaaagttcggcgcaccggccatgggagtgtccggcgcggccgtggccacccttatagcaaggacgattgagattgtgctgattctggggtacgtgtacggaaaaaagcttccggtggcctgcggactcagggagctgtttggctggagcggcctgttcatcagccagtttttcaggacgtcagcacctgtcattgccaatgagtttatgtgggggctgggcactaccatgtattccctggcctacgggcgcatgggagacgaggccgtggcggccatcaccatcgccaccaccattcaggatatcctggtggtgctgtttcagggcctgagcgcggccactgccgttatcctgggcaatgagctgggggcgggccatctcaaacgggcggagaagtatgcggtgcatttctttatcctccagttcattgccacggtaggcgtggctgtggtgctgattggaattcggcggcccatcatcagcctttacaacatcacgcctgaggtggcccggaacgtaagcctgtgcatcctgatttttgcggcctacatgccggcgaagatgtttaattatgtcaatgtggtgggcgtgttgagaagcggaggcgataccaagatgtgtctgttccttgataccagcggcgtgtggtttatcggcgtacccctggcgtttttgggagccctggtgtggaggctgcctatttatacagtgtatgcgctggtgatgacggaagaggtatataaggctgtgctgggatatatacggtacaggcagaaaaagtggctcagaaacctggcggcggaggtggggtgagccgggcagggggctgaaccaaagggtttgcgggcggcattcgagccagtgtctaagcccggcatctcctgcgggcaattaagggagagaatttatcttgccatataaaaaaaatcgtgttaatatagaaaagatgtgtataaaatacagcagagggctgtatttgaacgtataaaccataaaagaagaaacaggaaagggtgtttaccaatgtcaggacattcaaagtttgccaacattaagcataagaaagagcgcaacgacgctgccaagggcaagattttcactgtcatcggccgtgagattgcagtcgctgtaaaagagggcggagcagatcctgccaacaacagtaagctgagggacgttatcgccaaggcaaaggccaacaacatgcccaatgataccattgaccgcggcatcaaaaaggcggcaggcgatgccaattccgtgaactacgagacccttacatacgagggatacggccccaacggcgtggctattatcgtggatacactgaccgacaacaagaaccgcacggctgccaatgtgaggagcgccttcaccaagggcggcggcaacgtaggcacaccgggaagcgtgtcctatatgtttgataaaaagggacagattatcatcgacaaggaagaatgcggcatggatccggacgaactgatgatgcttgccctggacgcgggagcagaggatttctccgaggaggaggacagctacgaggtcgttacggcgcctgaggatttcagcgttgtgcgcgaggcactggaggcccagagcattcccatgatgcaggcggatgtgaccatgattccccagacatgggtggagctgaccgatgaggatgatattaagaagttaaaccgtacactggatttgctggatgaggatgacgatgtccaggccgtgtaccataactgggatgaataaacacgggcattgcccaaatggagcgcagctaagttagaggttttgctgcgttggtactatgaaatggaaagtcccctgcggcaggtcatcatgatctgctgcagaggactttttgtttgatggtttctgacaaaaacagaaatatggcctttaactgctctccgtctagttggacaccaccaaagtcttcaacccttccgttgcgtttggcgcattgaagatatacagagtataggatgtgttggcgctcatgttggcggaggtggctgccacggaagtgttggggtaggagccggtcctggagatatagagctgataccatcccgggtagaagctggtgtaaggggtcacttccctgtagcgtacattgctgaaagcagtgtaggaggagttctgattgccgatggatacgtcgaagggccccaggttcagtgacaggttgcaggcccgcagacagctggagcctgaaggcgcgttgcaggaaatgtcggatatttccatgatgtccaggccgcttgccgtattgatgatggcaatggtcatggaggcggaggagcgcacctgtactgtcttctgaatgtacacatagccgttggctcctgacacggtgacggtctgggtgccggaggcagactggacgtagcctgttatatccccgttccccaggctgcttgccaccatccagttgccaaggtacacgtaaaacggctggtacccggtggaagcattgaggatgcgtaccctgccgaagctggtggcggtacagttgtagcatgggaaggtgatgccgggtatcacggtgacagagccgctgtttccggggaaaataggccggaagataggaggaaagccgggacggctgccgctgtacacaggaccgccttcacctggattgggaagggggatgacagggacattggcaccgttattctgattgccgccgctgtacacagggccgccctcacccggattgggaagggggatgacagggacattggcaccgttattctgattgtcgccgctgtccacaggaccgccctcgcccggattgggaaggggagtcacgggaacatcggcttcccccagctctgccgcggtcaggagagtgtccggatactcactcattctgtctgtatgataggactgattgttcatagagacctcgcaaaagattgattcactatagtctattcatatggaataaggaatgtgtatgtttttgaaaaaaaggggactgcatttttggcgggctgatgcatataataaaaagaaccagtgtatcaggagcgtgggcgtatgtcatgggaaccaaagaaaacagccgtatccgcactggggctgccccgggacgtgattctgggagatgtgcttataagctttgtgggcaggagccaggtgaatgtggaaaattacaggagcatcctgatttacacggataccctgattaagctccaggccaggaactgcagggtggtgattcacggagcccgcttaaagattgattattatacggcggaggagatgaagataaccggccagatcggttctttggaatttgaaacgtaaatcaaaggagggggcttgtttgattgaatggctgttacataattgggaaggatatgtaagactccgtcttcacggctattcaccggaacgtttcctgaatctctgcaatgccaggggtctggaggtatggggactgatatgcaaccgggacggggattatgagttttttatgactgtggaaggataccgccgggtgaagcccctggtgcgcaaggcgcaggtaaggctgcacattaccggccgttacggcctcccattttttatttacaggtacaggaagcgctggtattacggtgccggaatcatggcctttttcatggtgctttatgttatgtccctgtttatctgggatatccagtttgagggcaattacaggtatacctacgatactctggtccgttttctggacacacaggacattgattacggcatgctaaaggccaggattaactgcgaggatctggaagcctccatgcgcacaagctttcccgagatcacctgggtatctgcccgtgtttccggcacgagactgctcatccacatcaaggaaaacgaggtgctgtccactatccctgagaaggacgagacaccctgcgacattgtggcgtcccagccgggagtcatcacctccatggtggtacgccagggcgttgcccaggtttgcgtaggggacgaggtggaggagggacaggtactggtcagcggacgggtgcccattatcggcgacaacgaggaggaaatcaatgcctacatggttcacgcggatgcggatattgtggccaggactgtcaagcaatatgagaaaacatttcccctgctgcatcaggaacgggtccacacaggacgcaggcggagaggatggtacatgaaagccggggcatggtcctttacctttctgaccccggtgaggggacagggggagtgggattattccatggaggaaaaacagctcaggctgttttccaatttctatctgcctgtctatatgggcgccatacagggccgggaaatggcagcctatgagagaaattacagggaggatgagctaaaagagctgtctaaagccataaattaccagtttgtcaaaaatttagaggaaaagggggtacaaattcttgaaaataatgatagaatagaaacaagtgtttctgaatgccgtctgacaggtgaactcgtgacggaggaatccattgttaagacacagccggcagcggagcctgatatgaattccggcggagagccgggagaaaaaccagaggagacaataactgctgaatgagtgtaattgagacaatgattgacattcccgcagagcatgagcggaatgtctgcggacaatttgacacctacttaaagaagatagagcgcaccctgcatgtgaccatgattgccagggacggcgaaataaaaatcatcgggcccgagaaaaccataggccaggcaaaaagcgtgttcaacaacctgattgaactgtccaagcggggcaataccatcacggaacagaacgtggactatgccctgtccctgtctttcacggagaatgacgggcagattttggagattgacaaggacatcatatgccggaccatatccggcaagccggtgaagccaaagacgctggggcagaagcattatgtggatgctatccgcaagaagatgattgtgttcggcatcggaccggccggcacaggaaagacgtatcttgccatggccatggctatccaggcgtttaagaacggcgaggtggggcgcattatccttaccaggccggccattgaggccggtgaaaagctgggatttttgccgggcgatctccagagcaagattgacccgtatcttcgccctctttatgacgccctgtaccagattatgggggcggaaagctatcttaacaattcggagaaggggctgattgaggtggcgcccctggcctacatgagaggaagaacactggacaatgcttatatcatcctggatgaggcccagaacaccaccccggcccagatgaagatgttccttaccagaatcggttttggttccaaggttatcataacaggagaccagacccagaaggaccttccgggaggcgcggtttccggtctggatacggcccttaaggtgctgaaacgaattgacgacattgggttctgttacctgaccagttccgatgtggtgcgtcatccgttggtgcagaaaattgtacaggcctatgagacatatgaacaaaagaataccccgcctgcaggacggcgcaggatacgggagcggaattaatccgccaaggagaagtgagcatgaccatttcaattgaatacgaagcagatagagtactggatttgccctaccgggagatcatcgagaacaccgtgctggctgccctggattatgagggctgtccctatgaggcagaggtcaatgttattcttacggacaatgacgccatacaggaaatcaaccgggaacaccgccggattgacgctcctacggacgtgctgtcctttcccatggtggattatgagtcgccatcagattttgaccatgtggaggaggctgtggaggattacttcaatcctgaaaccggagagctgatgctgggggatattgtgatttctgtggataaggtggaggaacaggctgagaagtacggccattcccggaccagggagctggccttcctgacggcccatagcatgctccatctgtttggttacgaccacatggaggacggcgaacggctggtgatggaagaaaagcagaaagagatactggaaaccagggggtatacaagatgagaatcgggttcagatggatggcaatgggtttaatggcaggactgacggcagccgcgcttttgacgggctgcgcgaaggaagccagcgtggaagcgaccacggttcaggagcctcctgccgcttctgaggccgctgaacccgatatcattatctggtcagaccctgagaccaccggggcggatacgggaaattctcaggactattatcttccggaggaacggactgaggagaacgggatgatacgcagctatctgaccggacagatggtggaaaccgccaagggaaaccgccggccggcggccgtgatgatgagcaatgacaaggaggccaggccccagtacggcatcaaccgggcgggggtggtctatgaggcgccggtggagggaagcatgaaccggtacatggccctgatagaggattatgacggcctggagcgcatcggatcggtgcgcagctgccggacctactacacttattttgccagggagtttgacgctgtctatgtccactatggccagagcacctttgccaagccttatctgaaaaatgtggataatatcaacggtctggatgccgtcggcgatctggccttttaccgcacaaaggacaagaaatcaccccataacgcctatacaagcgggggcaggattaccgcctccattgagaagctggggtacacgcagtcctatgcgtcatcctacaagggccattatctctttgccagggacggcagggaggcatccttaacggagcgtccgggagtcatggacgcgggcacggttaagaccggctacatcatgaaccaggcatactttgtgtacgacccttcggacgggctttaccaccgttaccaatacggcaaaatccatcaggggaatgaagggcccattgcggtgaaaaacgtgattttccagtactgccagactggccgttacgctaccacggattatctggatatcaacgtacatactacggaatgcgggtattttatgacagacggcaaagcgattcctattaactgggagaaggacggtgagttcggtcccacccgttactatgataccaaccacgatgaagttgtgctgaatcagggaaagacctgggtctgcatcattcccaccagggactttgccaagtcggaaattatcggaaatgaggatacacagtaatagacatgaatccaaggacaagcaggaaaaaaaacaggaaacagaaagcagctgattttgtcatacaggggagcatcctggccatggccggtatcgtggtgcgcatcattggcatgctctaccgcatgccccttaacgacattatcggaaaacagggaaacggatattatacgtcggccttcaatgtgtataatatcctccttatattatcctcctacagcatgccggtggcagtgtcgaagatgatatctgcccggctggcaaggggggagcacagaaattgcagccgcattttaaaagcggctcttatttatgctacggcagtgggaggcatagcggcagtggttttgtggtttggcgcggatttgttcgcggaactcatcaagacgcctttcagccggtacgcgttaaagaccctggcgcccaccatctggattatggcttatctgggcgtgctcagaggatatttccagggaacgggcaccatggtgcccacggcagtatcccagattttagaacagattgtcaacgcggtggtcagcgtggtcgcagccggagttctctttggcgtgggcacgtccattaacgctgcccagggggcaagggattattcctatgcactgggggccgcgggcggcaccataggcaccggggcaggcgcgctcacggcctttctgtttttcatatgccttaccgcgtccaaagggcgggagagaaggcagatggtccgtgaggatgtgtcggggagaacggagagctaccgcaggatattttatgtactcaccatcactgtgcttcccattgtcatcagcagcggcatctacaactgttccaatgtggtggacaattacctgttcggccagggcatggataagctgggctatctggaggattctatcgccacctactggggcgtgctggggcagtatcagctgctctttaacataccggtggctgtttccaatgccctttcatcctctctgataccatccctaacaagggctgttgcaaacaggaacaggagggagaagctggagcggattgccacctccatccgtttttccctgctgattgccattccggctgcagtgggaatcacggtgctggctaagccagtctgcaacctgctgtttatcagcgaggacaataccatgctgatacggctctccatggcaggttccctggccgtggtgttctattccctgtcaactgttacaaacgccatccttcagggcctgaaccacatggacgtgcccatacgccacgcggtcattgccctggtcatccacgtggcggcgctggaggtgttccttatggtatttaagatggaaatttacagcgtggtgtttgccaatatcatatttgcccttgtgatgtgcctgttaaacggacatgccattgccaggtttgccagatacaggcaggaatataagagaactctcatcctgcccacaatatgcgccggattcatgggagcggctgcttatggggtatacagaggcatttacgccctgcttccccaccggctgatgagaggcaggataggtatggctattgtggtgttcccttccgtggcagtggccattctggtctatgccgtgcttcttgtaaggttcagggcagtggaagaggaggagcttaagggcatgccgggaggaaggaggctggtccgtcttttgaaccgtttcaggctcctgggataagagacatataagtttatctgtttgttgtgatagattgggaaaaatttgagaatgcatgattaaaactgaataagaaagcagatactaaccataaagcggcgtccggcgccatgctgaccggcatggcggggccggggccagcgaggaggttagtgcatgaagaagttattatactgctttgccctgtttgcagtcacatccattgtgtgtctgattgttgcatatggaattacccggtatagcgtcaggcaggaacaggcagttcccaatacggttattgagacggagacagtcaacgatgtggatgacagggccgccatgaaccaggagcaggtaaagccaatactggaaagcgtttctccggcagaagaatactatcttgtgtcggagtccggctttctcctggtattttgcagcgaccgcagcaccatctgcctctatacccatattcctgtcacggattttccggaaaaggagagggagaggctgatggagggcatatggtttccgtccatgatggatgtataccattatttagaatcgtatacaagctgatgaaatccggctatgcggcattcgccagcctgggcggcaggctgcggtctacgcggtggccagatgtccctttttatcgtttttctggatgaagtccaatggttgtcttgccgcagccaaagggacctaacagggagacgaattccccgtccctgacttcaaaactgatgtctgacaaaacaacggtccgttccctggcgccacgtttacgtttcataaggatacgcagattcattcatcctgctgtgtgtgtggaaatgatgtccgcttggaaatgaaaggcggggagtgtgtgaaacattggccaaagggcttatacgcgctctccttctgcctggaagaaatttctaactgggcgggatcgtgctgaaacgccatgaatttcttctgtacggagaacgagtttgaccaatatgcacgggatatggggcttgatatggaaatggtaatcaaagcagatatcagccttgcggtaaaggaagcaagggaaacgtttcttgtaggtggaggctgattcaaaatcccccagggggagggtctgtcccagggaaaaaaatccaaagacggattccggcccgctgtccgcctacagggcaatcctggaggcgaaaaagcggggcgcgaagctggttgtcatagatccgtgcagggcgggaatgggagaaatggcggatatgtgggtgccaatcataccaggattcgacggagcccttgcgatggccatgacaaagctgatactggagagacatctgtacgacgatgggtttgtgaagaattataccaggggatttgaggcatatgaatcgtatcttaaaaccctgtcggcagaccggctttcaaggtactgcggtataccggttcagatgatagaagagcttacccgcctgttcgtttcaacggaaaacatatctcttgtttcctgcacagggctggagtatcagctcagcggggcgcagaataaccgtgctatccagattctgtgggccataacaggcaaggtggatgtggaaggcggcatttatataagcggcactgaaatacccaccaggaagcttgcgcccaagctggaaatcatgcctgtgggagcggagaaatatcctgtattttacggactgaccggatggggacagtttatggaattccccaacgcggtgcttcacgatgtaccttatccggtaagaggacttctgattcgggcggcctcgcctgccatttcctatccggaacagaaactgtggcgtcaggtatataaaaagctggatttcatggtggtcctggaccggttcatgacggaggacgcaaagtatgcggatgtggtactgcctgccgccacgctgtgggaaaatgattcattttgtgaatatccgggcggtatccggctgagagaacagataatcgggcctgtaggagaagcaaaggcgggtttgagtttgttatgacctgcggcaacaggagccctgtcagatacagctcctttggaccaaatatagaggcgctggcagcccttgacccatatcccacagcagatattgaccccgcggatgcagggcggctggaaatagaagaagggtgcggggtggatgtggagactgcctttggaacaaagcggttccgggccagaatcacacccatgcatcccggaaccatacatgtgttttcgggaggcggaagcagctatcattcaaaggagtggagggagggcaacatcaacgatgtaaacagcatgaaaatcagggatgatgtttccgggtttcctgcgtttaaggccattccatgcagaatcaaaaaggcataaggcattgttgaaaagggactggatttccgtactgggaatccggtcccttctgcgaaaaccaggattttagacaactgtttgggcggtctggttccgcaaatggcgccgtaaataacaggaaacagttgaaatgtgacagaaaaacatataaaatggggtgtaaacttaagcgcattaagagcaggataaggagctttggatcaatcatgagaaaacgaatcgtcatcataggaggcggggcctcgggactgactgcggccattggcggggccaggaacggggctcatgtgaccattgtggagcacatggaccgggtgggaaagaaaatcctgtccacgggcaacggcaggtgcaacctgaccaatctgaggatggaggaggattgttaccgctgcggccagaaggggtttcccatggaagttatccggggctttggggtggatgagaccctggccttttttaaaggtcttggaatagagccaaaggacagaaacggatatatctatcccaattcggaccaggcgtcagccgtgctggacgtgctccgcagtgaggtggagcgtttgggcgtggcggtgttgctttcgtgccgtgtggagaagatagagccggcggtcggcggaggcggcgtccgctataaagtgtacacggaccagggcatactggatgcggaagcggttattctggcagccggttccaaggctgccccgtccaccggttcggacggaagcggatatgagctggcaagaaggctgggacaccggataatcaaaccgcttcccgccctggttcagctgcggtgccagggaagcatgtaccggcagatggcgggtatccgtacggaggccggggtaaagctcatggcggccggtgaactgctggcccgggacaggggagagctgcagctgacagactacggcctgtcgggtatcccggtattccaggtcagccggtttgctgccagggccctggaccaggggaagagggtcaccgctctggtggatttcatgccgtcctgggatgacagcgaggcatttgacctgcttaaaaagcgtgcgtcccttctgggccataagacggcggaggagctgtttacaggtctgctgaacaagaagctggccctggtgttcattaagctggcaggcatcaaaccgtcccagaaagcgggagatttgtcacccaaacagctgaagctgcttctgggacagatgaagtcctacgaagccattgtcatgtcagtgaatccatttgccaatgcccaggtgtgctgcggcggcgtggataccagggaagtggatgccgccaccatggaatccgggattcacgccaacctgtatctggcgggagaactgctggatgtggatggaatctgcggcggatacaacctgcagtttgcctggtccagcggtatgatagcgggggtacatgcggcgggaggatattttgcggagacacatgaggcggacagaaacagggcggaggcacatggagcatatggccctgccccagggggaaagaggaacagaaaatgattcgtatcaatcagttaaagatgccgctgggacacgacagggctggacttttggagaaggctgccagggtgctgcgtgttccgtccggagagatagagaagcttaccatcgtcaagcagtctgtggacgccagaaaaaagccggatatatggtacagttatgtggtggacataggaatcaggcaggccggactccagaaggaggaaaagctggtgcgcaggctgaaggaccggaatgtgtcggtccgcaaggaaacaccctaccggcttcctgagccggggaccaatcttatggccagccgtcccgtcattatcggtaccggcccggcagggctgttctgcggccttatgctggccagaaaggggtacatgcccatactcctggaacgcggggaggacgtggacgcaaggacagaccgggtagcccggttctgggaaacagggcagcttaacccgtcctccaatgtgcagttcggggagggcggagcaggaacattttccgacggaaagcttaatacccttgtaaaggatacgtctggaagaaaccgggaagtgcttcgtatactgacagagttcggcggggacccgtctatcctgtatgtgaataaaccccacatcggaaccgatgtattaagccgcattgtcaaatccatacgaacggagattgaaaatctgggcggagaggtccgcttcctgagccaggtcacggattttgtgacggacggggaacagggggaatccaggcgtataaaagcccttgttatcaacggcagccaggttcttgctgctgagacggtggtcctggccatcgggcacagcgccagggatacctttgagaccctgctggccagggggatccccatggagccaaaggcatttgcggtgggactgagggtacagcatccccagacgctgattaatgagagccagtacggcataaaggaatgcggggaattggggccggccagctacaagcttacatggaagtcctctgacgaaagaggagtctattccttctgcatgtgccccggaggctatgtggtcaatgcgtcctctgagccgggccgcctggcggtcaacggcatgagctatcatgacagggcgggggaaaatgccaacagcgccattattgtcacggtcacgccggaagatttcggcgggatagaggcagagtccgggatggaggcagagtcagggacggagcggggctgcgaagcgccgggggacgccatggcaggaatccggtttcagaggcgtctggaggaggctgccttctgcctgggaaagggaagcataccggtgcagctctacggggattttaaggcaggccgggtttcagacggctttggcggtgtaaatcccgccttccagggcgggtatgcctttgccaatctcagggagctgtttccggaaccattgtcccgggctttcatggaaggaatggaaggatttggaaccatgattcgcggctttgaccggccggatgccatcctggccggcattgagagccgtacctcatcccctgtccgtattccccgggaccagggaatggaaagccctgtgaagggaatctttccctgtggtgagggcgcgggctatgcaggcggaatcacctcggcggccatggacggaatcaagacagcagaggaaattatccgcaggtacagccccttaagcccttcttagagcatggccgggggaggaacatttacaacatagaaattgacgtgacctgtaaattggtgtaagataaacaggaatcgtttgatgagataaaggagtatatcatgggaacccaggaacgtcagaatcttgcggataagcagaggattgtgattaaaattggttcgtcttcccttacccatgtggagacaggggaagtgaacctgatgaagatagaaaagctggtgcgggttatcagtgacctgcggggacagggaaaggacgtggttctggtgtcctccggggccattgcggcagggcggcaggccctgggccatcacaggaagccggacacccttgctgagaagcaggcctttgcggctgtgggccaggccaggctcatgatggtctaccagaagctgtttgcggaatacaaccagacagctgcccaggtccttctcacaaaggacaccatggtcaatgattcttccaggtacaatgcccagaatacctttgacgagctgctaaacctgggaaccatacccattgtcaatgaaaacgatacggtatccacctcagagattccgtatgtggacagcttcggtgataatgaccggctgtcagccattgtggcggccctgatcggagcagatctgctcattctgctgtctgacatagacggcctttatacggatgaccccagggagaacccggaggccggatttatcagcctggtgcctgaaattacgcctgaattcctgcgtatgggcaaggatacgtcgggcagtgacgtgggtaccggcggaatgtcagccaagctggccgcggcccggattgccacggacagcggagccgatatggtcatagccaacggagaccaggtggatgtcatactggacatcatgtcaggcaaggaaaagggaaccctgttcctggcccataccaatctggattttgacctgatgcattatctgaataatgaatactagggaaggcgcccggccgggcgccaggtcctgaaagaggtgaatgtatggacgcgtcaaggattgaccgcatcaacgaactgtatcacaagtcccaggcagtgggactgacagaggaggagaaggaggaacaggcccggctgcgccaggagtacgttgcagcgattcggggaagcctccgcaataacctgaacaatatatccatcaaggagccggacggctccatcacggatttgggaaagaaacatggcggaatcagggaagtctgatgcattgtgaaggggagattatgatgacattgaatgaaataggcagccgtgccaaagaagtatcgcgagtactgggtaccctgggatccagagagaagaatatgggactggaggaagcggccagggctttgctggaaggtgaggaggaaatcctggaggccaattccagggattatgagaaggccagatccgacggcatgagccagggactgctggaccgtcttaagctgacgccggccagggttcaggccatggcggacggcctgctgcaggtggctgccctggaggaccccgtgggggaggtgctgtccatgaagctccgccccaacggccttcagattgggcggaagcgtgtgcctctgggggttatcggcatgatttatgaggcccgccccaatgtgacggcagacgccttcggcctttgcttcaaatcaggcaatgcggttatcttaaagggcggaagcgacgcccttcactccaacatggccatcacccggtgcctgcgcgcaggactctcaagcgccggcctgcccgaggactcggtccagatgattgaggataccagcagggataccaccagggagctgatgcgcctgaacaggtatattgacgtgctcatccccaggggaggggcaggactcataaagaccgtggtggagaacagcaccatccccgtcatagagacgggcaccggcaactgccatgtgtatgtggatgcttccgcggatcagaatatggccctggatattattttcaatgccaagacccagagaatcggcgtgtgcaatgcatgcgagtcccttctggtgcacaggagcattgcggaggaattcctgccccttctcaggaagaagctggaggagaagcaggtggagattcggggagacgaggacgcctgtgccattgagccgtcctttgtccgggccacggaggaggactggggcagggagtacctggattatatcctgtccttaaagctggtggactcggtggatgaggccatccgccatatcaacacctacaatacaggccactcggaaaccattgtgacctctgattattttaacgcccaaaggtttttaaacgaggtggacgccgcggctgtctacgtcaacgcttccacccgctttacagatggtgaggaattcggtttcggagcggaaatcggcatcagcacccagaagcttcacgccagaggccccatgggccttaaggaactgaccaccaccaagtatattatttacggagatgggcagatccgctgatgacagctacagacgggccgggacattttaaatttgttcccggcttcgtcagacagaatgcaggaaaagaggaaatatatatgcttgaagaggaaagcagcaggaaaaggagcaggaaacagcaggaggaagaacccttcagctggaaaaaggagattatcagctggatacagattatcgtggcagcggttatcatcgccctggtccttaacaactttatcatagccaacagccgtgtgccaaccggctccatggagaacaccatcatgtccaagagccgcgtcatcggttccagactggcctatctgaccagcgaccctgagaggggagacgtggtgattttccatttcccggacgatcccacgggaaaaatctactacgtgaagcgtgtcatagggcttcccggcgagactgtgaatgtggtggacggaaaagtctatatcaatgattcagatacgccccttgacgagccttaccttccggaaccaatggaaggatcctatggtccctataccgtgccggagggatgttacttcatgatgggtgacaacaggaacaattccctggatgcccggttctggaagaaccggttcgtggagaaggacaagattatagccaaggtgctgtttacgtattttccaaagatagagaaagtggagtaagagaaaagtggagtaagagacaggatgaagataatcatatcacctgccaagaaaatgaatatcagggaagacgagctggaatgggcgaatcttccctgtttcctttccagggcagaagaactgaagaaatacatacagggcctggatttagaacaggccagaaagctgtggcagtgcaatgaaaccatagcccggcttaattacgggcgctttcaggacatggaccttgaaaggcgcctgacaccggccctcttatcctacgagggaatccagtatcagtacatggctccgggggtgtttgagcagggacagtgggattatgtgcaggagcacctgcgcatcctgtccgggttttacggtatccttaagccgctagacggcattgtgccgtaccgcctggagatgcaggcaaaggtggagctgccgtcaggtatcaaaagcctttatgactactggggaagctccatctgccgggaactggccgcagatgagacattgattgtgaatctggcctcaaaagaatacagcagggcggtggagccgtatctggaagcccatattgactatgtgacctgtgtgttcggcaccctttcagaggacggaaagggcggttttaaggtaaaggtgaaagccaccgaggccaagatggccagaggggagatggtccggttcatggcggagcggggcgtccgggacgcggaggggcttaaggagtttgaccgtctgggatatggctactgccaggagaaatccggggataaggaatacgtgtttatcaaattcagagagcagtaaagcagggacctgtatgccggcgcggcgtacaggtctcttttcacggtcaggctttcaggctaatatcatagccaaatccttttcaggcgtggagatgggatggatttcaaactgttccaccagatatcccagtatggccggagagaggaaggcgggaagggtggggccaagatagatattcttaatgcccaggtgcagcaggcttaaaaggatacagaccgccttctgctcataccaggacagaaccagggtgaggggaaggtcattgactgagcagccgaatgcttcggccagggctatggccacctggatggcgccaaacgcatcgttgcactggcccatgtccagaaggcggggaatgccggccagggatccaagctccaggtcgttaaaccggtatttgccgcaggccagggtcagaatgagggtgtcctcaggcgtctgcttcacaaagtccgtgtagtaattcctgccgggacgggctccgtcgcagcctcctaccagaaagatatggcgcagctcctttgttctgactgcctccgccaccgtgcccgcggcagccaggacagcttcccgcccaaagccggtggtgaccattgttccgccgttgattccggggagggtcatctcctcccgaaagccgccaagctccagggccttttggatgacaggagagaagtctttgcggccgtcaatatggaccatgccgggataggacaccagggcggtggtaaatacccggtcagagtaagaggatttgggcggcatcaggcagttggtggtaaagagcacgggggcgggaaggtctgcgaattccttctgctggttctgccacgcggttccgaaattgcccttcagatggctgtatttcctgagctccgggtaagcgtgggcgggaagcatttccccgtgggtgtatacgttgattccctttccccgggtctgttccagcagaagcttcaggtcgtgcaggtcatggcctgaaataacgatgaagggaccgggttccacggtaagacttacctgtgccggggaggggatgccgaaggcctggcggttggccctgtccaacatcgccatgcagtccaggttcacggcgcccagttccatgacaatgggaagcaggtcctgaaccgtatagccgtcatagccaacggcaaacagccccttatagaaataatccatgactcccctgtcctcatggcccagcaccatggcgtggtacgcataggctgccattcctctcatgccgaacagtatcagggatttgagggagcgtatatcctcgtcctccgaccagagcctgttcatgtcaaaatcctctgtcctgccgcagtctgccgtgcaggaaccgcacatgggggacagggaatcctttaagcgcccggcttcctcgagaagctcattcagggcgttgtcgtcaaagcttacattggtaagggtggcaaacagtccctttacgataatgcggtccgcttccggggagcggtcctttccttccgacgccctggcaaggccgataagggcgcctgtgagtctgtcctgaatcccggcagtgacggctgtcttgccgcatacacctgcttttcccacacatccgctgcatcccgcggtctgttcacattgaaaacaaaacatattgtgttccatgatgtatcctcctttaaatactttaaatatataagtgggcgggcggtatgttccgcctgcccttgacggtatgaggaaagtataatataattctgacaacaagtaagttgttggaacaacattaaaggagaaaaatatggatattcatttgctggcaggaacaaggctgtttcacggaatcagggagcatgagatagaggccatgcttacatgcctttcggcggaagagaggacctatggaaaggaggcctatatatacagggccggggatgtgacaggccgtctgggggtggtgatggagggggctgtgaacatcattaaggacgatgtgtggggaaacaggaaaatcatagaaaatataggcaggggacagatattcggggagacgtacgcatgtcttaagggagaacccctgatggtggatgtgcaggcatcggaacgctccagaatcctgtttatggacgtaaaccgtatcctgaccacctgttcatccagctgcgatttccacaaccgtctgatacggagcctgatgtatgtgctggccgggaaaaacctgatgcttacgaaaaaaatggatatcatcacccccaagtccctgcgggaaagggtcatggtgtacctgtcccaggaatccgtaaagcagggcagccgtaccatcacagtgccctttaaccgccagcagatggcggactatctgtccgtggacaggagcgcgctgtcggcagagctgtccaggatgcagagggacggggtgatttcatatgagaagaaccgtttcacaattcagtcgctttccacgcaataaaaatcacaccagccgcagcgtgttcccgggatattcatgtgtgagaccggacacctgcgatacgggcagaaccgcactcctcccggaactggtgtgatgggattattgtagcattgcagggggaagaaagcaagatgtatccgctgcctgcgcgcagtaaccagcaattcccacttgaataagaacatatgttctgatatattgaagccaggaggtgaaagcagtggcggctttaaatatacccatacagatgtttggcgcctgcagtaccctgggagatatgacgcccctctggttccggtatgagaataaggatcacggaatcatcacggtgaagattgagagcattgtctcttccagggaagagaagttctgcggcatggagcatatcagctttgtgtgctgggccgtggcagagggacaacggcgcctgattgagctgagataccgcatatccacccataagtggtcatttttcaggacactgtcatgagaagccaggaagatcaggtatggtaccatgtggatgtgaacagcgcctatttaagctggacagccgcatacagggtttgtatcctgggggaggatctggatctgcgggatattccctctgtcatcgggggaagcgaggcggaacggcatggcattgtgctggctaagtccggctctgcaaagaggtatggaatcaggaccggggagacattggcggaggccagatgcaaatgtccgggacttgtaatcgtacccccggattacagcctgtatgtgagctgttcaaaagcccttgtggagctgcttaagaagtattttccccacgtccaccagtacagtattgacgaggcattctgccgggtggagggaacaaagggattgtggggaacacacacagcctttgcgcaccagctgaaggaagaaatacgccgggagctgggctttaccgtgaacatcggtgtgtcggactgcaagcttctggctaagatggcttctgagttccaaaagccggaccaggtccacacactgtttacctgggagatagagaggaagatgtggccgctgcctgtaagcgatctgttctgggttgggcccgccacggtgagaaagctgggagcgctgggaataaggaccataggggagctggctgtcatggatttggagctgctaaagaggcatcttaaaaagcagggggagtttatctggaattatgccaacggaagggatgtgtccccatttttgagggaacttccacggaataaggggtacggcaattctatgaccacgccgtttgatgtgacggaccgggagacggcctggcaggtcatattgtcccttacggagaccgtgtgcgccagactccgggccgatgggatggaagctgcctgcgtgggcatttccatcacagacagggaatttcgccatggttccgtccagaccaccctgatttccgctacggataccaccctggaaatctatgaggcggcccggagcctgtttgaccgtctgtggaatcattcgcccatccgccagatgggggtccatacaagcaaggtcagtcccaaaggccattatcagtatcagctttttgacaggggtctccatgacaaatactccaggctggacgcggctgtggatgagataagaaaacggtacggagaggactgtgtgcagagggctgttttcgtggaaaaccggattccccacatgtcgggcggcattgacaaggtgaaacggaccggagtcacgaaggccgtgtagaggaccgggttttccggtagactctcggggagcagccctttatcttatggaataccttggagaagtaattggggtcggtgaagccggccctcagggctgtctcggtcatggtcagctttccctccagcacatcggggatactcttttcaatgcggtattttaacaggtattcaaacagggattccttcatataacccttaaagacccggcagcactcgcttttgcagatatggatgtggcgggaaatgtcatccagggtgatatcggactgatagttttcatggatgaaggagagcatctgccgaatccgttcctgattcttccggactgctgcatgtgccggttccgggtcagggcggcagtgtaggtataacagcttccagaaacggcacaggtccatctggatgtccatttcataggtttcgtagcgctggccgtcaatgcgtatgatatcctccagaagcccgactgcttccctgtgccattcctccgacaggtcgaagcagactgccggcagagcggtatgttccgtcagagggtccgtataccggctggcaatcctgcttccctggtagccgtacagcagccgggggtggaaggtgatggagatgtacttgcagtcatggccgtctgccatgtgtccggtgtgcatggtattggagttgccgaaaagcgcctgcccggccctgggatggaatatccggtcattgatttgatataccatagtcccctctgtgatgagggtgagttcgatttccgtatgccagtgccactggaaggagctggtgtagaacctggacagggcctcgtcgctgacaaggacgggaaattcataggttccgtgttcctttagttcttcctggtgttcgttggtcatgatttggattttagaaggcatggcagagggctccttttgcatgttttacggctgggatatgttttccggtttggaaaagctgttccgttaaaagctgttccattaaaatctattccattttatctgttctgtttgttctcaatattgtcgggttatatcccatgaattataacatttcttaataaaaaactcaatatattcccttttctgcgcatgattttcaaggataaatcatgttgtttttttataatagaaatcagagggaatcaaaaacaaagaaaagaggagattgctttggagagaagacgcaggccagcaaagagccaatacctgaaccgtgtgataacctatatgagggagcatctgcaggagaacctgacgctgacccagattgcaagggaagcagggctgtcggagagctatctcaacgcggtttttaaggaatgcatcaagtgcgcgcctatggattactacatcaacatgaagatggagcaggcctgttatcttctctgcaatacggacctgcatatatatcaggtggcccagcatttgggatacgagaaccaatattatttttcaagggcctttaagaaggtactgggagtgcctcccaagaagtataaggaaatgcccgggataccggcagtttccatgcaggtttcctgctgaggaccgttgctgaggacagggcgggaaaatgctgctgcatttgaacgcaatacctgcagggagggatggcagtgaagaacctgaaaatgaaagcagtcagggccggcatggatttatcccaggaaaaactggctgagctggtgggggtgacctgccagaccattgggatgatagaggcggggaagtacaacccgacgctgaatctctgcgtggcaatccgcaaagcgcttcacaagacactggatgagctgttctgggaagaacagcaggaaatatgaaaatcagagagaacggaaggggaatacggatatgatggatgagagaacaacacaggtattttgcttgattttttaggcattgcaggaaaatctataaaactgaaaattccatcgaaaaaaacaattggaatgagctaggcaaaccttgtagaatgagaaggaaaaaatgtcggaaaatggggtatcggggaatgctatgctggaagcaaggggattgtcaaaatggtttgacggaaactgtgttttaaagaatgtaagcctgacaatcagggacggggaagtctatggaatcatcggcgccaatggttcgggaaagagcaccttcatgaacatcctcaatggaaatgatgccattataaaaaccggaggttatgagggagaaattctgattgacggcagaagggtgcggattgaaagccaccgccagtcagtatccgaaggaattgcaatggtacaccaggagcttgccctgtttgccggaatgagcgcggctgaaaatataaaaataaacagggaacatgtaaagataaaggggcccatactgccggagctggggtatgtggaccataagaagaatgaggaggatgccagaaagacactgatacggattggggcggacctggacccggcccggcttatagacagcctgtcccttaaccagaaacagtttgtggagctggccagggaactggataaccaggatgtcaggctgctgatgctggatgaacctaccagttcccttaatattacggagacaaagagtctgcttacgtgcatccgggagattgcggcttcgggaatctccgtactgtttatctcccacaggctggaggagatcatggaagtgtgcgataccgtgtccgtcctcagggatggtgagctgatatccacctacagcaaagaagaatttgactgtcaccgttttaccgatgacatggtggggcaggaaatcgtgaaggtatgcagccacaggaagcgggaaaaggggaagaccatattccgttacggcaatatacaggggatgggagacaatctggatatatatgaaggggagattctgggcataaccggactggccggccagggccaggaacagctcctggaggggctgtttggccttagggcggcagactaccaggcatatttcagggggaggcagattacaaagggagataacaggaacctgattaaaaacgggatctattacctcccggaggacaggtcctcgcacagtctgttcccggagagccctatatggaagaacatggtattcggcacagaggaccgccatccggaatttctgtccttaaggcgctggaaagccctatccttctttaagaaaagggcggtaaggtcctacgcaggggagatgattgaaaaactgaatatcgtatgccggggaccggaccagaaggtgcgtgagttaagcggaggaaaccagcagaaggtatgcgtgggccgtgccctgaccttccggccggatcttttgtacataggggaaccgaccaggggcatcgatatttattccaaggagctgattctcaagtggattctcaagataaaccaggagtacaacaccaccgtggtggtggcctccggggaactggaggaactggtccgtatctgtgacagaatcgtggtaatgtatcagggaaaggtatataaagtgttcgagaatgacatagggccggaagaacttaccctggccctttacgggagggaaccggatgaagcgtaactatttgaatcctccccggatcatcatgtttttatttatggcagtcctgctggcagcggcgtcagccattgatatgagcatgacgggaattatgaacgatgccctgattaaatgggccatgaacggagtaatcgtgttatccctgattccaatgatcaatgtgggggcagggaggaatttcggcatgtccatcggcctgtcagcaggacttgtgggcatgatattttctgtgaacgccagatatacgtcctgggccgggttcttttactctgtgttcctgggaatggccgtggcgctgctgttgggttatctctatgcaaagattctgaatcatttgaagttaaatgaagaaatcgtgggcacattcgcagggtattcatttatccctgtcatgaatctgttttacacctttgcgcctgtcaccaaccgtcagatgctgtatccaatcggaggccaggggctgaggcccaaggtgaacctggaaccgtatttcggccaggtcctggaccggctctggcaggtgaggataggggaactggtaatcccggcagggctgctgctgtcttttttcggaaccggctttctcttatggctgttttcaaagacaagggcaggaatgatattttctgctatagctgagaacgaacggtttgtgcggctggccggtattaatgtgaatggataccgcaccgccgcaatcatcatgtccacggtcatcgcggccgcgggagtggtggtctattcccagagctacgggatactccatctgtacgacggccccttcatgatgagctttcccgctgtttccgccattgtaattggcggcgccagccccagaaaggccacggtggccaatgccctgataggaacctttctctaccagacaacataccttttgtccattcctgtggccaatgccctgctgattccggagatggcggaaatcatgaggacaatcattacaagcggaatcattctatatgcatttatatttgagaggaaggacatgagaaatgaagcacattaaaaacaacctggtacctgtttccatctttgtgctggctgtcatatcctttcggctggccggagtcagcggcaggtatctggcagcagaggtatatacacggtttgcaagaaataccctttttaccctggccctgatcctgccggttacatgcggcatgggtatcaactttgccattgtggtgggagccatatccgctcagatggcaatggtattttccgtggacctgagattggagggggccgtggccctgatgtttgtcacaggggccagtatcgtgctgtccattcttttcggcatgatggtggcggctcttttaaacagggccagggggcgtgagatgattgtatcaatcatgatcgggcagcttagttcagtcatataccagtttatctttatggtggcgtacggatttctgattcagccaaggaacagggatatcctgctggacaggggaatcggggtcagaagtatggtggatgccaggaacataagcagtgtatttaaggggatactgccctttcggttcgacggaaaaacatattcgctttttcctctggtcatcatcctgtttttcagcctggtgcttttctacatacagaagacacggctgggaaccctggcaagggctgtggggacggacggggggacagccggtaccctggggatagccggaaaccgggtgcgcagcatctgcattgtcatttccaccatatttgcggccatgagccagattctgtttgtggctgattttgggaccatcaatgtatatacaggtcatcttggcctggatacctttgcggcggcagccatattggtgggcggagcgtccatcaaaaaagccaggatgaggaactgcttcataggcgtcatcctgttccacgccctgttcatcacttcgcccatggccgggcagaacctctttcataacccgtcggtgggagagtatttccgctccttcctggcatatggggtgattgtgacagctattatcatgaacctgaggaacgaaaggacaaaggtccagagcatttgatgcggtgttggggcaatatgccttcatacataaaaaataaaacggaggaacttatgagaaagagaattttatgcacggtcctggcagcttccatggcattagcggcatgcagcagcccggcatccacacagcccccggcagccccctggacggaggaagcgtcttccaccgagagtcagacccggacaaccggggagcaggagaaccaggacaccacagaggctgagaccgaagcttccggcgagccgtacaaaatcggtatcgtaacaccaacccttacagtgagcgaggatgaattcagaggcgctcaggagatggtccaaaggtatccggacctggtggtacataagacgcttccggagaattttgccacggataaggagggctgcatctctgttgtaacaagcctggcagatgaccctgagatgaagtacattttattcaataatgggatggagggaatcgtaccggcattccagaccatcagggagaagcggcccgacattgtaaccatggtaaccagcaatgacgacccgaagctcctgaatgattatgtggatatctccatcaatacagactggatcagaaggggtgaaaccatccccaccaaggctcatgacatgggggcaaagacatttatccactattccttccccacccatatggcggctgagagcaagtccaagagaagggatgtgatgaaggagacctgtgagaagttaggcatgacatgggtggaggagaccacgccggatccccagaccggcaacgggacagcagccatgcttcagttcctcagggaagatattccgaggaagattgaacagtacggaccagacaccaatatcttcggaaccaactgccctatgtacgatgtgatactggacgaggcattcaaggagaaattcatcgttgcggaacagtgctgccctacacctacccaggcttatccaacggtgctcaatctggaaatcacagaggaggatttgggcgattacagcaagattaacaacctgattgcagagaaggcccgggaggcgggaatgtcaggaaggctgtccggatgggccatgccgtcatccgtatatatacctcagcttcaggtagagctggctaaatatatgcatgacaataacctgagccctgaggatgtgttagacagggagttcctgaatcagtttaccagtggacatatgccggtggccgctgacttccaggtggcaggcgaaggattggatcactattatatgttgattctggaggatatatattattaggatgtgagaaggctataaccaaaacctacaggacaacctgccccgcggttggtgtaggccggccgcggggcaggtcctttgttgcgggccgcggcacagggcgttttttatgttgacttcccaaccattttaaagtaaaattcatactgttaatcgtaattggctggaccgtgcaataggcccggcctgctattcgtttcgggaaagcgtgcagtaaccagactgaacgatttaaattaatagaagctaaggagcagataaatggaagaatccagagataccatggacaacatagaaaatgcagaaacagccataaaccagggccctcctgccggggagccggagcgtcagcagtacttcatggagcgggctaagagacagctggccgagctttccgccaggctgggacgcccccttacctgctgcatcaacaccttcggatgccagatgaatgccagggattcggaaaagcttctggggattttggagacaatcggctacaaggccgcagaatcagagaaagcggattttgtgctctacaacacctgcacggtgcgggaaaatgccaatctgcgggtttacggccgtctgggtcagctgggggcctacaagaaaaaacatcctgatatgatgattgccctgtgcggctgtatgatgcaggaggaggaagtggtggcgaaaatcaaaaaaagctaccgctatgtggatttgattttcggaacccacaacatattcaagctggccgaactggtatcccaatgcctggaggggcggactccggacgggcagaagcagggaaaaacgaagatggtggtggatgtgtggaaggatacggatcagatcgtggaggatttgccggtggagcgcaggtttcctttcaaatcaggagtcaacatcatgtttggctgcaataatttctgcagctactgtatagtgccctatgtaagagggcgtgagcgcagccgcaggccggaagaaatcatcaaggaaatacagaagctggcagcggacggagtggtggaagtcatgctccttggacaaaatgtaaattcctatggaaagaacctggataatcccatgacctttgcgcagcttttggagaaagtggagaagatagacgggattgagcggatccgtttcatgacatcccatccaaaggacttatccgatgaactcatagaggtcatggcagggtctaaaaagatatgccgccatctgcaccttcccctccagtccggcagcagccggattttgaaggtcatgaaccggtgctatacaaaggagcagtatctggatttggcggagcggattaaaaaggcagtgcctggcatatccctgacaacggatatcattgtgggatttccgggcgagacagacgaggactttgaggaaaccatggatgtggtgagaaaggtgcggtttgacagcgcctttaccttcatctattccaagcgtaccggcacaccggcggcagccatggaggaccaggtacctgaggagattgtaaaggagcgttttgacaggcttttgaaggaagtacaggatatctcggccgaggtgtgcgggcgggatgttaagacggtccaggaggtcctggtggaagaggtgaacgtccatacgccggggcttatgacaggccgcctgtccaacaacacagtggtgcatttcccgggagacccatccatgattggacagctggtgcctgtgtatctgcaggagagcaagggattttattatatgggacatatggctgataaggaaaatggataaaaccggaccaacaaaaactaacagattaagataaagcaagaataaccaagcatactagagaagagaggtcagcattttgatagatttgtcacaattatctcccatgatgcagcattatatggagacaaagaaggagtatccggactgtatcctgttttaccgtctgggagacttctatgagatgtttttcgatgatgccctgacagtgtcaaaggagctggagataacccttacaggaaaggactgcggcctttctgagcgggctcccatgtgcggggtgccgttccacgcagtggactcctacctgtaccgtctggtccagaaggggtataaggtcgccatcgcggagcagatggaggatcccaagcaggccaagggcctggtgaagcgggaggtaatccgggtggtgactccgggaaccatcaccagctcccaggttctggatgagacaaagaacaattacctgatggggattgtatacatggatggaatctacggcatatccacggcagatatcagcaccggggatttcatggtgactgaggtggactcagaacgggaactgtttgacgaaatcaacaaattttccccatctgaaatcatctgcaacaatgccctttacatgtcaggcgtggatatggacgagcttaaaaaccgctatcaggtggtcattaccgccctggacagccgctttttcggcgaggaatcctgccgccgcatcctgatggagcattttaaggtgggagccctggtggggctggggctggaggactatgccaccggcatcattgccgccggcgccgtgatgcagtatatctatgagacccagaaaagtaccttggagcacattaccaccgtcaccccctattccaccggacagtacatggtcattgacacatccaccagaaggaacctggagctggtggagaccatgcgtgaaaaacagaagagaggcactcttttgtgggttctggataagacgaagacagccatgggagccaggctgcttcgcgcctgcatcgaacagccgctgattcacagggacgaaattatcaggcgccagaacgcggtggaagagctgaacatgaactatatctccagggaagagatatgcgagtacttaaatcccatctatgatctggagcgtctgattgggcgtatcagttataagacagccaatccaagggatctgattgccttcagaagctctctggaaatgcttccctatatcaaacagatattgggagagtttaacagcgaacttctggcagagtttggccgggaactggacccgctgcaggatatcttccggctcataggggacgccattgtggaggagcctcccataacggtcagggaaggcggcatcataaaggacggctacaaccaggaggcggacaagctgcgccaggccaagacagagggcaagaactggctggcggagctggaggcaaaggaaaaagaaaagacaggcatcaagaccctgaaggtaaaattcaacaaggtattcggttactattttgaggtgaccaactcctttaaggaccaggtgccggattactatatccgtaagcagaccctgaccaacgcggagcggttcaccaccgatgaattaaaacagctggaagatattatcatgggcgcggaggaaaagctggtgtcactggagtatgacctgttctgtgaggtcagggacaaaatcggggcagaggtcatacgcattcaaaagactgccaagtccatagctggaatcgacgtattctgctccctgtccgtggtggctacccgccgcaattatgtgaagccctccatcaacgacaagggcgtaattcaaattaagaacggccgccatcccgtggtggagcagatgatgcgggacgacatgtttgtggccaacgacaccttcctggacaatgggaagaaccggctgtccgttatcaccggtcccaacatggcaggcaaatccacctacatgcgccaggtggccctgattgtactcatggcccagctgggcagctttgtgccggcccaggaggcggatatcggcatatgcgaccgcattttcaccagggtgggggcttccgatgacctggccagcgggcagagcaccttcatggtagaaatgacagaggtggccaatatcctgcgcaacgccaccagaaacagccttctggtactggatgaaatcggaaggggaaccagcacctttgacggattatccattgcctgggctgttattgaacacataagcaattccaagcttttgggagccaagaccctgtttgccacccattaccatgagctgacagagctggagggcaccatagcgggggtaaagaattattgtatcgcggtaaaggagcagggggacgacatcgtattcctgcgcaagattgtccgcggcggggcagataagagttacggcatccaggttgcaaagctggccggcgtaccggattccgtcatagccagggcaaaggaaatcgcggaagaattaagcgatgcggacatcacggccaaggcaaaggaaatcgcggatatcagttccaacataacccagcacaaggcggtgccgaagccggacgaggtggacatgcagcagctgtccttctttgatacggtaaaggatgacgatatcatccgggagctggacagcctggagctgtccaccatgacgccccttgacgcaatgaacactttgtaccgccttcagacaaagcttaagaaccgctggaaggagaccggatgaattttcacatactgacactgttccctgacatggtcatgggaggcctgggaaccagcataacggggcgggccatggagaggggaaccatatccgtggaagccatagacatcagggattattcaaaagataagcacaggcatgtggacgacgccccttacggcggcggcgcgggcatggttatgcagcccggacctgtgtgcgaggcttacgaggccctgtgcgggcgcatcggcaggaagcccaggcttatctacatgacgccccagggcagggtgttcaaccagaccatagcagaggagctggcaaaggaggaggacctggtctttctctgcgggcattacgaaggaattgacgaacgcgccctggagctgattgccacggactatctttccgtgggggattatgtcctcacaggcggggaacttcccgccatggtcatgattgactgtatctcccgcctggtgccgggggtactgaacaatgacgcctcagcaaaggaggaatccttccgtgacagcctgttagaatacccccagtacacccgtcctgaagtattccgcaaaatggaggttcctgaggtgcttttaagcggccaccataaaaacatcgaagagtggcgcaggcagcaatccataaaacgcaccctggaacgccgcccggaccttctgaaacaggccagcctgaccatgaaggaagtaaaatacctggattccctccgtcaggaaaaaggcgacctggaaatcctggaggagctcctggaccaatacgtaaaagccctgggcgacgaggccgccgccggccgcatcaaacgaaaggcaatggccggggcaaagaaattgctggcagagaaggcttgtacggtgggggagctggaggggtactataaagtgatggggttgcttgcggggggatgaggtgggggtgaggcgcatccggccgtgagaggaacgggggcggtgccggaggtgaccctttccgcgatgggaccaagtccctccgaatcgctccaaagtcacctccaccaccgcccccgttcctccccgcccagcaacatccccccgcttcgccggaataaagaacaggccaagggtacgggcagcctgttatcccaagccagcgcagctggaacagctccggcctgcaatttttttaatgagcgggggagagtcagcggggaaaagaaagagtggccggaaaagcggcgggaggaggcggggaggctgagcgaattttactgagggccgctgtctcttagccgggaccgggagcggagcagggggtgagggagggcgtacaacgcccaagcgaaagggaacgcggaggcgaactcatcaagagttcggcggagctttcccgatccccctgcgcagctcccggtcccggcttagagacagcccccgaaggaaccatgagtccagactccccgcctcctcccgctgcttttcctcgatccccttccccgcgtccccacccccacgaatatcgtcatcttgacaatcccccaataatattgtacaattctctgaaactatccacacaaatacatccattacaggccccggcccatgctttccgggcttttgggaccgtaaaatatgaaataataggagttgatttttttggccccatcgggtgacagtattgccatacgtgtcgttatcattattattttactgggactttccgcttttttctcgtcgtcggagaccgccctcacaaccgtcaataaaatccgtatcaggacattggcagaagggggaaacaaatctgcgcagtgggttatgaaactgtctgagaatcagggaaggatgctcagcgccatcttaattggcaacaatgtggtaaatctttcggcatcttccatgcttaccgtgctggtaacggaaatatttggaaataaagccgctggagccgcgaccggcgtactgacgcttttaattttgatttttggtgagataacacctaagacaatggccaccctggaggcggagcggtattccctgcgggtcggccatatgattcacattctgatgacagtgctgacccctctcattatccttattaactggatgtctctgattgtccttaaagcccttcatgtggaccctgataagaagaacgacgacattacggaggacgagctcaggaccattgtggacgtgggccatgaaaagggcgtcatcgagtcggaagaacgtgagatgattaacaatgtgtttgacctgggagactccgtggcaaaggatgtcatggttcccagaatcgatatggtgtttgctgacattgaggctgattatgacgacctgattcagatatttaaggaggagcattataccaggcttccggtctataaggagacaacggataatgtggtgggcatcatcaatattaaggatctgctgctggtggaggacaaggcgtccttctgtgtgtcggattacctgcgccagccattttatacctttgagtctaaaaagctgtccgagctgatgatggagattaagaagtctcccaacaatattatcattgttctggatgagtacggcgccacggcagggctcattaccctggaggatatcctggaagaaatcgtgggcgatatccgcgatgagtatgacgaggatgaggaagaggaactggtggatttgggagacggccagtatctggtggaaggttccatgaagctggatgatctcaacggcattttggatttagatctgtcctctgaggactatgattctgtgggaggtcttgtcattgaccgcctggaacacctgccttcccagggcgaagaggtggtgtgcggcaacgtgcgtctggtggtggagcaggtggaaaagaaccgcattgacaaggtccatctgtatgtccttcctgaggagaaagaggagaatatagaaggaaggcgaaacagctcataaaatgcttgcattttgggacaatatatgctagaataagtcgttgtgacaagaaatagatggtcctctgttactgtgagtagtgaatctgatttactgccggcgtattaagaacatccaatagatgaaggaggttcacacgatgaacgatattattaagaacattgaagcagcccagttgaaggaaagcgtacccagctttaacgttggcgataccgttaaggtatacaacaaaattagagagggaaaccgcgagagaatccagattttcgagggaactgtcattaagagacagaacggcggagccagagagacctttaccgtaaggaagaactccaatggtatcggcgttgagaagacctggccattacattccccaagcgttgacaacgtagaggttgtacgtaagggtaaagtaagaagagcaaagctgaactacttaagagacagggttggtaaggctgccaaggttagagaattagttaaataatcaggtagtggaagtgagaatagagtttgcagatgcaaactctattttgttaagcaggcggcatacccggaagcagtccgggaagtgccttaagagataggtgtgggtacatggatttttatgtgaatgaggatacggcgtggctgagaaaagcagtccgctgggcggtcaatgtggtgttggtcctggcctgtgcctggttcctggtctacagtttctgtactcaggtgcctgtgtcgggcggttccatgcagccagttttagatgcggacgacgtggtcctggtgaatcgcctgatttatgatgtgggaaagccggaacggtttgatatcgtggtatttgagcgtgaggaccacaagaagaatgtaaagcggatcatcggtcttcccggcgagaccgtgcagattaagggcggttatatattcattgacggcgagcttttaaatgccgaggacggcctggaacaggtgtccctggcaggaagggcggacactcccattaagctggaggacaacgagtatttcctgctgggagataacagggacagcagtgaggacagccgtttccccaatattggaaatgtaaaaagagaacagatacagggcaaggtctggttcaggatgttcccccttctgaagctggacttcattcattcaagatagaacaggagtttacaaatatgaacattcagtggtatcctggtcatatgaccaaggcaaagcgggccatgaaggaagatatgaagcttattgacctggtaatagagctggtagacgccagggttcccctttccagccggaacccggacattgatgacctgggcgcgggcaaggccaggatggtgcttctcaacaaatcggacctggcggacgaggggcagactgcccgctgggcagcctggtttgaggacaagggcattcatgtggtgaagattgatgccaggaacaagggaacacttaagcaggtgcagtccgtaatccaggatgcctgtaaggaaaagatagagagggaccggcgcaggggcatactcaaccgtcccatccgtaccatggtggtggggattcccaatgtgggtaagtccaccttcatcaattccttcgcgggaaaggcctgcgccaagactggcaacaagcccggcgtcaccaagggaaaccagtggatacgcctgaataagacgctggagcttttggacacccccggtatcctgtggcccagatttgaggaccagcaggtgggccttaagctggctctcatcggctccatcaatgaccagattctcaacaaagacgagctggcctgggagctcatacgctttttgaaaaagcgttatcctcaggtgctgtctgaacggtttggcctggagacggagggaaaggaagcggcatttatcctggaggaaattgccagggtccgggcctgcctgttaaaaggcggggatctggatgtgtccagggcggcagccctgcttctggatgatttcagggcgggaaagctgggacggatcacgttagaggagccggagaatcaaaaggacaaggtgggatgacaatggctgcaagggtgctaaagggagaaaagctggagcaggaaatggcccgtctggaggccatggcggaatacgagaaggaatatgacgcatacacttatatctgcggcattgatgaagccggacggggacctttggcaggaccggtggcagcaggagccgtggtgctgccaaagggatgccgcatcctgtatctcaacgattccaagaagctgtcggagaaacgccgggaggagctgttcctagagataaaggaaaaggctgttgcatggaatgtgggcctggcaactcctgccaggattgacgaaatcaatattcttcaggctacctatgaggccatgagggaggctgtgaagggccttgccgtgaagccggaaatacttctcaacgacgctgtcaccattcccgggctggatgcggtgcaggtgcctattattaagggggacgcaaagagcctgtccatagcggcggccagcgtcctagcaaaggtcaccagggaccatatgatggccgagtatgaggaactgtttccgggatatggattcgccaaacacaagggatacgggacggcggcccacatagctgccatcagggagcttggcccctgccccattcacaggagaagctttatcagaaatattgttcaggcggatacataggaacaggcggatacataggaacaggcggatacataggaacaggcggatacatatgaataagagacagacaggcagccgttatgaggaaacagcggctgtttttttaacaagtaagggttaccgcgtgctggaacggaatttccgttgccgccagggagaaattgatttgatttgccgccatggcatatatcttgttttcgcggaggttaaataccgttccgggctgtccatgggaagcccggcagaggctgttgacgcaaggaagcaggagaggatacggcgggcagcggccttttatctgtacagccatggaatgggcgcagatgttccctgccggtttgacgtggtaggaattctgggcagtgacattgagctgatacaggatgcattttgaatataaggaggcaatggtgttatggatataaactggagctataagaacaagtctcacgtatttgacataaaagacagtacgggcgttccctatctctcatttaaggcgctggatgataccggactggcggtcaatggtttttccacccgcatgggcggagccagcaggggaaagttctccaccatgaatttctcttacagcaggggagacgcggcggaagatgtgctggaaaactttacgcgtatggcagctgccctgggagtggagcgggaccgaatggtggtgtcccaccagacacatacggtcaacctgcgccgggtgacacaggaggatgcgggaaagggcgttgtaagggaaagggattacagggacatcgacggcctgattaccgatgtgccggggcttaccctggtgaccttttatgcggactgtgtgcccctgtaccttctggacccggtgaacagggccatcgggctcagccactccggatggagagggacggttaaacgtatgggccaggtgacggtggatgccatgaaggaagcctttggcacaaagccgggggatctgattgcatgtgtgggccccagcatctgccgggaatgctttgaagtgggcggtgaagtggtggaggaattcaggaaagcctttgagccggaatactgggaagaactctattgccagggaaaaagacccggaaagtaccagctggatttgtggaaggccaatgaaatcattttccgtgaggcgggcatacgccgggagaatattcatattactaatatttgtaccatgtgcaacagcgattacctcttttctcacaggaaggtgggggaggagcggggaaacctggcggcgtttctgtgccttaggtagcatggcctgttctggaacagcggatggagcgcagccggatgtactgggacattatgggaggcggatattttgagaccatgcagcaggaacagctggctgccatggaagtaccgccgcatggaacctggtgtgacaatcgagagaaacaaaaaaatgcacagtccctttcggtgggcatttcgctgccgcggaccgtgcatttttgaatattgattttcctgtattaattcctcggtattgattcttctacatggatgacagggttttatacaagcttctggaaatactcgtatccgccgttctgatgcttctggaccagcttctgaatcttctccgtgggagaaagggaggcgctgatggagcggtcatggttcatggagttgatgacagcggccaggtatttgctcatgtcggcttccagataccactctctgtcaatcagttcctgggtgcggtaattcaggttggtggtgatgacataatccagatatccctggtggtagtactcgtcaaatttctcaaggccgttggtgaagagaccgaaggtacagcatacaatgaccttgtcagccttgtgttcctttaactccttgcaggtatccagcatgctttcgccggaggatatcatatcgtcgatgataagtacggtctttccttctacggaagaacccaggaattcatgggccacgattgggttgcgtccgccgattacctgggaataatccctgcgcttatagaacatacccatgtccacacccaggttgttggcaaggtatacggcgcggttcatggcgccctcgtccgggctgatgaccattaagtgttctttatcaatacggatgttggaatcatggaaaaagagggcctttacaaactgatacgtgggcatgaaattgtcaaagccaatcagcgggatggcgttctgtacccgcgggtcgtgggcgtcaaaggtgatgatgttttccacacccaaggctgccagctcctctaaagccatggcgcagtccagggactcgcgtttgctgcgcttgtgctggcggctttcatataggaagggcatgaccacattgaccctgtgggcagtggcggagcaggccccgataatccgcttcaaatcctgaaaatggtcgtccggcgacatatggttggtataaccgcttaccgtatagggaatgctgtaattcatcacatccaccatgacaaaaacatctgtgcctcttacggattcattgatgacggccttgccctcgcctgttccgaatctgggacagctgcagtgaagcagataggaatccacgtcataaccgcggtagtgaaggtcctccttgcggcgcatcagttcctctatatcattgcgcctgaattgtacaatatggtcgttcaccttggctgcaagattcttacagctttccagtgcggcgatttttaaaggcgctacggggagggaatctttgaatacaaaattgttagccatgatagctttgctcctttggaatcatcatttgtttgaaaatatcacatatgatttataccatttccgtttgaccgggtcaaggggttgatataatttcgtcaaaaaaaacaagaaattttcagaaacatttttagaaaattaactttgcatttacaaaaataagttatattgctatgatagaggttaataagaaagtgctttacaagtcaggtccggtatagtaaaatcaagcggatgcgaagaatttgtgttaaaggatatggattcatatgaaaccggaaaagaacagaaagaccagctgcgagtgctgcggcaattacgtatatgatgaggaaaatgattactatgtctgtgaagtgaatctggatgaggatgagatggggcgctttttgagaggtaccgtaaacgcatgtccttattaccagtccgatgatgagtaccggattgtgcgcaggcagatgtgacgtaaggtcattaatgaggaggttataaacatgagcaaaccaatagttgcaatcgtaggcaggcccaatgtgggaaagtctacgttgtttaatgtcatagcaggagataccatttccattgtaaaggacacgccgggcgtgaccagggaccggatttacgcggactgcgaatggctgaatatgaatttcacgctgattgacaccggcggcattgagccggattccaaggatatcatcctgtcccagatgcgcgagcaggcggagattgccatttccaccgcggatgtgattgtttttatcgtggatgtgcgccagggactggtggacgcggattcaaaggtggctgatttgctgcgcaagtcccacaagccggtggtgctggctgtgaacaaggtggacagcgttgccaagtacggcaatgacgtctacgagttttacaatctgggaatcggagatcccatcgctgtgtcggctgcttcacggctgggaatcggtgatctgctggacgaggtggtgaagcactttgactcggagcagatggaggaagaggaggacgagcggccaaggattgccgtggtaggcaagccgaatgtgggaaagtcttccattataaataagcttctgggtgagaaccgtgtcattgtgtcggatatagcgggcaccaccagggatgcggtggatacggaggttatccatgaaggcacgccttatgtattcatagatacggccggcctgcgccgcaagagcaagataaaggaagaactggagcgctacagcatcatccgcaccgtgtccgctgtggaacgggccgatgtggtggttgtggtcatagacgcaacagaaggcgtcacggagcaggatgccaagattgccggaatcgcccatgagaggggcaagggaatcattgtggccgtaaataagtgggatgccatcgagaaaacggacaagaccatatatgaatataccaggaaaatcaaggagatcctctccttcatcccttacgcggaattcctttttatatccgcggcaacgggacagcgtctcaccaagctttttgagatgattgacgtggtgcgccagaaccagaacctgagggtggccaccggcgttctcaatgaaatcatgacagaggcagtggccatgcagcagccgccttcagacaagggaaaacggcttaagatttactatatgacccaagtggcggtaaagcctcctacctttgtgatctttgtcaatgacaaggagctgatgcatttttcttataccaggtatctggagaaccagatcagaaatgccttcggctttaagggcacatccttaaaatttcttgtcagggaacgaaaaggaaaagagcaataagtgtaagaaaagggggattaaggagtggaacagattatatgtttggtcatgggatatgtttttggtttattccagaccggtttcatttacggcaagtccaagggaattgatatacgccagcacggcagcggcaattcggggagtaccaacgcgctgcgcgtcatgggagtaaaggcaggtctcattgtattcatgggtgatttcctgaaaacggtgataccctgcttcctggtaaggattcttttccggtcccagccggggtatatctatgtgctgatactttgtacgggcttcggcgtcatattgggccataattttcctttttatcttaagtttaagggcggtaagggaattgcggcgacagcagggatcatgttttcactggactggcggctgacggctgtctgcctgctggtctttgtgctcatcgtggcagtgaccaggtatgtgtccctgggctccctggtggtgtccgctattttcctgtgctggaacatctatttcggccatttgggggcttacgggctcgtacccgaggccagaccccagttctacgctgtttccgcggtgatagcggccatggctttctggaggcacagggcgaatatcgtcaggctggcacagggcagggagaacaaggtaggcgctaagaaaaagacagagtagtatacaaaggacagtaaaaaacaattaatggacggtgaggttatggcatcaatcggtgtaatcggatcaggcacttggggtacggccctgtcagttttacttaacggcaatggacatacggtacagatatggtccgccatcccgcaggagatagcggaactaaaggatacgcgtatccatcgcaacctttctgaggtaaggatcccggaagcaatcgggcttacggatgaccttgaggaggctatgagggacaaggaccttctggtacttgctgttccctcggtttttgtgaggcagacatcacaaaggatgagggcctacataaagcagggccaggtgataaccaatgtggcaaagggaatcgaggaaaagagcctcatgaccctgtcccagataattgaggaggagctgccggaggcggaggtgacagtcctttccggacccagccatgcggaggaagtgagcaggggacttcccaccacatgtgtggcgggcgctcataaacgcagcgtggctgaatttgtccagggaatctttatgagcgaagtgttccgcgtgtataccagcccggatgtgctgggaatcgagctgggaggagcccttaagaatgtgattgccctggccgccggtatggccgacggcctgggatacggtgacaacaccaaggcagccctcattaccagaggaatcgcggagatatcccgcctgggcattgacatgggcggacggatggagacatttgccgggcttactggcatcggggacttgattgtgacctgcgccagcatgcacagccgcaaccgcagggccggtatactgattggccagggccgtaccatggaggaagccatggcagaggtgaagatggtggtggaaggcgtatattccgccagggcggctctggcgctgtcacagcagtacgaggtgtccatgccaatcgtggaacaggtcaatgccatcctgttcggaggcatgcccgcaaaggaagcggtcctggagctgatgcttagggataagcgtatcgaaaactcggatttagagtgggcagaggaataaaaaataggggaaaggaaccagaaatggtgcctttcccctaaaaaatagcctgtttttggcggattatacctgcttttgctctaatttttcggcaaatcatcaaaaataaaccataattttcatgaaacgattgacaaacccacccggactacctataatatagaaagctttatattttaaaggcaagaggaggaactaattatgaagaagagatttttaagtctgggcctggcggccgttatggctatgtcattgacagcatgcggcggttccaatacggcagagaccacaaaggcaacggaaactactgcggcagacgcaaaagcagagggaagtgaggcagcagataccactgcggcaggcggcgtgttcaaaattggcggcatcggccctgtgaccggcggcgcggctgtgtacggcgtggctgtacagcacggcgcagaactggcagtaaaggaaatcaatgaggccggaggaataaacggcgcacagattgaattcaatttccaggatgacgagcatgatgcagagaagtctgtcaatgcttataatacattaaaggattggggtatgcaggtgctgatgggcacggtaacctccgctccatgtatcgcagttgcggacaagaccgcagctgacaacatgttccagattacaccatccggttccgctgtagagtgtgcggctaaccccaacgtattccgtatctgcttctccgatccggaccagggcgctgcatccgctaaatacataggcgagaacaagctggcttccaaggtcgctgttatctatgacagctccgacgtatattccagcggtatctatgagaagttcgtggaagagtccgcaaaccagggaatagagattgttgcagccgaggcctttaccgctgacagcaacaaggatttttccacccagttacagaagtccaaggatgcgggcgccgagctggtattcctgccaatctactataccgaggcttccctgattcttcagcaggccagcaccatgggatttgctccccagttctttggatgcgacggtatggacggtatccttcaggttgagaattttgacaccaagctggcagagggacttatgctcctgacaccattcgcagcagatgcaaccgacgacctgaccgttaagttcgtagacagctacaaggctgcttacaacgaggttccggtccagttcgcggcagacgcgtacgatgcgatctacgctatcaaggctgccattgaagatgccaatgtaactcctgatgcagacgccggcacgatttgcgatgcgttaaaggcatctatgctgaacatcaaattagacggcctgaccggcgagggcatgacctggacagaggacggtgagcctcacaaggcaccaaaggctgttaaggtagcggacggagcttacactgcaatgtaatcagcagtcctttgaatccggacagaaccaaccagaaaacccaacagagggttgtcactatgacaaccctcttgtttataggtgcgcccggcgggcgcacgttctaacgatatatgatataattttgaatgatctgtcgctttatagcgataaactaaaaaagacttcagacgaagaggtgtaggtatgggctttattaactatttgattaacggcatcagcctgggcagtgtatatgccatcatcgcgcttggatatacaatggtttacggcattgccaagatgctgaatttcgctcatggcgatgttattatgataggcagctacgtggtgtttgtcacggtcagcacaatgggattgccgcccatggcgggggttctccttgcggtggccgtatgtacgctgttgggcatgaccattgaacggattgcttataagcccctgcgcggcgcctctcctctcgcggttctcattacggcaatcggtgtcagctacctgctgcagaatgttgcccttcttatctttggggcagataccaagtccttcacctctgtggtgactctgcctgccattaagctggcaggaggagagatgaccattacaggggagaccgttgtcaccatcctttcctgtgtcatcatcatgattggactcactgcgtttatcaacaagtccaaggccgggcaggccatgctggcggtttccgaggacaggggtgctgccacccttatgggaatcaatgtaaacggcacaattgcccttacatttgccattggctccgcactggccgccatagcgggcgtgctgctctgctccgcgtatccgtcccttactccctatactggttccatgccgggtatcaaagcctttgttgcggctgtattcggaggaatcggctccattcccggcgcctttatcggcggtatcctgctgggcgtcattgagattctgtccaaggcatacatatcctcacagatgtcagatgccattgtgttttccgtcctgattatcgtgcttctggtgaagcctaccggtattctgggcaagaagattaatgagaaagtgtaggtgccggtatgaagagcaacgcgaaacgaaagatattcataaataatatgattacatacggcatggtggtggctgcctatatcatcatgcaggttctggtgggaacaggacatatatccagccttatgaaaggactgctggttcctttctgtatctacgtcatcatggctgtttccctgaacctgaccgtgggcatcctgggagagctgagtctgggccacgcaggctttatgtgcgtgggagcctttgccggagccctgttttcaaagtgcatgaagggagccgttgacccgaccctgggaatggtcatcgccatcctcatcggagccgttacagcggccctgttcggcgtcatcatcggaatccccgtgctgcgtctgagaggcgattatctggccattgtgaccctggcctttggcgaaatcatcaagaacctggtcaatgctgtttatctgggacgggacgctgccggcttccatatctcctttaaggattccatgtccttaaagatgggagagggtggggaaatactgataaagggcgcccagggcatcacggggacgccccaggcagccacctttaccataggcgtcattctggtgctggtcactttgtttattgtcatgaacctggtgaactcccgcacgggccgcgccatcatggccatccgcgacaaccgcattgcagcggagtccatcggcatcaacatcaccaagtacaaactgctggcattctccatttccgccggacttgccggtgctgccggtgtgttgtacgcccacaacctgaccactttgacagccctgccaaagaacttcggttacaacatgtccatcatgattctggtatatgttgtactgggcggcatcggaaatatccgcggttccgtcattgcaacggtcatcctgtatctccttccggagatgctgcgcggactcagcaattaccgtatgctcatgtacgcaatcgtgctgattctggccatgcttttcaactccgcgccccagtttgtggtgttgcgtgagcgtgtggcggagaaattcagcagaaaagataagaaacccgcaaaggaggcagcataagatggcattacttgaagttaagaatttaagcatatcttttggcggccttaaggcagttgacaactttcaaatcagcatagaaaaggggcagctttacggccttatcggaccaaacggagccggtaagaccaccattttcaacctgctgacaggcgtatataagccggacgcgggaagcattgagctggcgggagtcaacattaccggtaagaaaaccacggaaataaaccaggccggaatcgccaggactttccagaacatccgtttgtttaaggatttgtccgtgctggacaatgtcaaagcgggccttcacaatcattacaggtattccactacggccggaattttccgttttcctaactattttaaggtggagaagcagatggatgagagggccatggagctgctcaaggtattcggactggatgaggagtgcgactacaaggcgtccaaccttccatacggaaagcagagaaagctggagatagccagggcgctggctacagagccaaagctccttctcctggatgagccggcggcgggaatgaatccaaacgagacagccgagcttatggataccatccgttttgtgagggataatttcgatatgaccatccttctgattgaacatgatatgaagcttgtcagcggtatctgcgaagaactgactgttctcaacttcggacaggtcctgtgccagggcgagaccggcgcggtgcttcacaatccggaagttgtcaaagcatatcttggtgaataggaggagcgtataatatggcaatgcttgaagtcagggatctggaagtatactacggtgtaatccaggccataaaaggaatctcctttgatgttaaccagggagaaattgtggctctgattggtgccaacggtgcggggaagaccacgaccctgcataccatcacaggacttatcagcgcgaaaacaggtaaaatcgtatatgagggaaccgacataaccagggtttccggttataaactggtgggcatgggaatcgcccatgtgccggagggaaggcgcgtgttcgctacccttacggtgcttcagaacctgaagatgggagcttatacaagaaaagacaaggaagagacagagtccacgctgaagatgatataccagcgtttcccgcgtctaaaggagcgcaagaaccagcttgcaggaaccctgtccggaggcgagcagcagatgcttgccatgggaagggcccttatgagccatcccaggatgattgttatggatgagccctccatgggactttcacctatctatgtaaatgagatatttgatattatccagaagataaacgcagatggcaccaccgtgcttcttgtggaacagaacgctaagaaggctctttccattgcccataaggcatatgttctggagacaggaaatattgctctcagcggagatgcaaaggagcttatgaacaatgatcaggtaaaaaaagcatatctcagcgaataaagataaagatggttcattgtcgggaatatattttatggaaaaaagaatcacggatatgagaaaggagcaggggaggataacccctgcttcttcccttgacaccccaggtaagatatgctatatatagtgtacggctgagacggtactggaatctgaacgacgttttttacctgagtgctgaaacactcaggccataggataaggggtggataaatgcttgaacgacaggacttggagatgatacgagcaatcatgaaagaagagattgcggaatcgcaggagcatatcctgacagaggtgaataagaaactggatacgcgccttaccggtacgcaggagcatatcctgacggaggtggataagaaactggatacgcgccttaccggtacgcaggagcatatcctgacggaggtggataagaaactggatacgcgccttaccggtacgcaggagcatatcctgacagaaatagacagaagactggatacccgtttcacagaatcagagaatctgattcttggggaattggaccgggtacaggataatctgacagaacggctggacacgatgaaacgcagattagatgagatgacagagtattacaggattaagaagctggatgatatcaatggcgccatgctccttaagatgatacaggaagtggaaaaaagagtggaagccctggaggcgaagacagcctgattttatccattgactttgcgtgaataaagctgatacagcgtgattctgcaccagtcatatactcatacccccctgcatatactataaaagcatagcaagggggtatatttatggacaattttaatgtatacaaggatattcaggcgagaacaggcggagagatttacataggcgtagtagggccggtccgcacaggcaaatctaccttcataaagcggttcatggaactgctggtgctccctgcaatggaggatgagaacctgcgcaatctgagccgggatgagctgccccagagcgcggccggcaagaccatcatgaccacggagcccaagtttattcccaaggaagcggccagaatcaatctggcagacggcattgaagccaaggtaagggtcattgactgcgtgggattcatggtagacggtgcagccggccatgtggagaacggcgaggagcgtctggtgaaaacgccgtggtttgattatgacattccctttacccaggcagcggaaatcggaaccaggaaagtcatcaatgaccattccaccattggaatcgttgtgaccacggacggaaccataggggaaatcaaacgtcccggatacatagcagctgaaaagcagaccattgacgaactgaaaaaactgggaaaaccatttgtggttcttttgaattccaccaaaccctactcagacgagactgccaggctggccagggaaatgtctgaatcatacggagtatcggtgctacccgtaaactgcgagcagcttaagaaggaggatatcttccatattctggaatgtgtcctaaaggagttccctgtgactgagatggattttcatattcccaaatggctggagatcctgccgtccactcactggcttaaggcccaggtcatccaggcagccaggaatgtaattcagaaggtgacccatatgaaggatgtgtccggggaactgaaacagcagcatacggataccatccgctccatgaatgtgaaaaacatgcagatggcggacggcagggtgggcgtccaggtggatatggacgacagctactattaccagattctcagcgactatgtgggactgcccattgaaggcgaataccagctcatgcagaccctgagcagcctggccaatatgcagaaggaatatgaaaaagtgcagaacgctctgacccaggtgcggttaaaggggtacggggtggtgacgccggaacgctcagaaatcgttctggatgaaccgcaggtcataaagcacggcaacaagtacggtgtaaagatgaaggcggaagcaccgtccatcaacctgattaaggcccatattgagacagagattgctccgattgtgggaagcgagcagcaggcccaggatctgattgcctatatcaaggaaaatgccagggagagcgacgacggaatttggaataccaacatctttggaaaatccattgaacagattgtggaggacggtatccaggccaaggtgtcccagatgacggaagactgccagctgaagctgcaggataccctgcagaaaattatcaatgacagcaacggcggtatgatatgcattattatttaaaatcgtcaacaatggtttgcatgttgagaaaaggactgtttacagaaaattgtgcaaatattacaatacgatttgcattcttatggggattatgatatactgtagccataattgacagaatattctgtgaggcaagactatattatactcggaggggagaatgcagatgagacttacatttatcggtgccgaccatgaggtaacgggcagctgtcattttctggaggtgggaaataccaaggtgcttatagactgcggtatggaacagggaaataacatataccagaatgcggagctgcccgtggggtatcatgagattgactatgtgcttctgacgcatgcgcatattgaccatgcgggtatgcttccgtggattcacgccaggggattcaggggccaggttataaccacctatgccaccgctgacctgtgcaacatcatgcttaaggacagcgcccacatacaggagatggaagctgagtggaaaaaccggaaggcgcgccgtgccggcaggggtgaggtggaagccctctataccatgcaggacgctgaggatgtgcttaagcattttgagggtgtggcgtatgggcaggtatttaagctcaatgacaacctgaccctgcgctttacggatgtgggacatctactggggtctgcttccatagagatatgggccactgagggcgccggcaagaaaaaaatcgtattttccggcgacattggaaacaagaataagcccctgatccgtgatccccagtatattacggaggcagattacgtggtgatggaggccacctacggaaaccgctaccacaaaaaggatgtaaaccatgtggacagtctggccagaatcattcaggagaccctggaccggcagggaaatgtggtcataccggcctttgcagtgggacgtacccaggagcttctgtatctgatacgccatattaaggaagaaaggcttgtgaccggccatgacagctttgaggtttacgtagacagccctctggccgtggaagccacccacgtgtttaaggacaatatgctggagtgctatgacggggagacaaaagctctggtggaacgtggaatcaaccccattgattttccgggactgaagctctccattaccagtgaggaatccaagaacataaactttgacatgacgcccaaggtcatcatatcagcggcaggcatgtgtgatgcgggccgtatacgccaccacctgaaacataatctgtggaggccggagtgttccgttgtgttcgcgggataccaggcagagggaaccctggggcggattcttcaggacggggctcagaccgtgaagatatttggagaggaaattgatgtgcgggcccatatagaaaccatggagggtatcagcggccatgcggacagggacgggcttatcacctggatatccgcatttgagaaaaagccggactatgtgtttgtggtccatggaagcgaggaatcctgcgtatcctttacggatgtgctgaatacccagctgaaactggcagccaaggcgcctttttccggttcccagtttgacctcataaaaggcttctggattaaagagacagagggtgttctaattaagaaggagactgccgccaaacgcagggccagcggtgtttacaccaggctggtggatgcgggcaagatgctgcttgatgtgattcaccgcaatgagggcggcgctaataaggacttgacccgttttacggaacagattcttgccctgtgcgataaatgggacagatagaatgttactgacaggagattttgacacatgacgaaagtacagatttacacagacggttctgccaggggaaatcctgacggaccgggcggttacgggacagtgcttcattttatggacagcagcggccagcttcatgagaagactatgtccggcgggtatgtacgcaccaccaacaaccggatggagctgatggctgctattgtagggctggaggcgttaaacaggccgtgccaggtggaattatattcggattccaaatacctgacagatgcgtttaaccagcattggattgacagctgggtggcaaaggggtggaacaggggaaaaagcgggccggttaagaatatcgacctctggaaacgcctgctaaaggcaaaggaaccccaccaggtaaaattcatctgggtaaaaggacatgcaggccatcctgaaaatgagaaatgcgatgccctggccacctctgcggcagatggtgagaatctgatgacagaccaggggctggaggcataaataagcttcaccctgatacagtttaaaagcgggaaggcgctgcttaaccctggcttacgttcggagcaggggatgcggcgctttttttgcatttgtatctgttcctgattttcttacatatctcttacaatctattactccttttatcttcgtgtttcttttcttccttttttgtgataaggttaatacatgattatggcagggatgtgttgcgatgaaagaaaaaaggatatggattgtaattggctgtatcctggtcataggaactggtgttacccactataccaaatactatgtgaacagccagggagcagccatgatggctgagattacagcaggggcagaagagacggcggcgtcatcctttgccccggctttgggacagctggatacagaaacgggcggggcggatgcaggtatggcggctggcagggcagcgcccgcaacacctgcggagcgcaggatgacgggagatgcgggacctgggaatgcagcttcaggaaacgctgcatcgggagatgcaggtcccggaagtgcagatcctggaaacgcagcttacgcagcggctccggcagcagaggcagcgggggcctttccttcggaccatgcagctccggcaatggcggatgccgctgaggagacgatggcttcggatactgccggatccgccggtgcaggtgagggagccgctgtttcggaaactgcttcggaaaaggatatgcctatttcccctctcacaggagccaggaccagggagtacaaggcaagtcttattgtagactaccgtaaacgcctggaggatttggacacccagatccttaagatgcgggaggaggaaacggattccaatgtatattccatcaaaacctcagcggagacagagcttaagctgtgggaaggagagctgaattccatttacaatgcgctgatggagatgctgtcccaggaggatgcggcaaagctggcttccgaacagcaggaatggcttaagaacagggatgccagggcggcggagagttcgggcagaaacagcggatccatggagggaatcagttatgcggccgcattggtcagtctgactagggacagggcttacgagctggcaggccgctatgaggaggccaacggggtgttctacgaggatgaggattcttcccaaacggcattgccgtagcaggcgaaggcatggaaagaacagtccgtatgacggggactgaaaattgcgggtaagagggaaaaacaatggaaaatcattggttttccctttcttttttgttaagacagtcttgataattatatagcgttatggtaaaatgacggttatgtaatgagagcaatgatatggaggaaaataaagtgaaagaaccacagtaccgcggcgtgaacgagcttcgccggatgttccttgaattttttgagagcaagggccatctggcaatgaagagcttttcactggtgccgcataatgataacagcctgcttttaatcaattccggtatggctcccctgaagccatatttcacaggacaggagattccgcccaggaagagggttaccacctgccagaagtgtatccgcaccggtgacattgagaatataggaaagacagcccgtcacggcacctttttcgagatgctgggtaatttctcttttggggattattttaaaacagaagccatccactggacctgggaatttctgaccgatgtggtgggactggacccggacaggctgtatcccagcgtgtacctggatgacgatgaggcattcggcatctggaacagggaaatcgggattccggctgagcgcatcttcaagttcggcaaggaggacaacttctgggagcacggctcaggcccctgcggtccttgctcagaggtatattacgacagaggcgaggcatttggctgcggaaaacccggatgtacggtgggctgtgactgcgaccgctatattgaggtatggaacaatgtatttacccagttcgacaatgacggacatggtcattatacagagctggagcataagaatattgatacgggcatgggcctggagcgtctggctgtggtggttcagggcgttgactccctgttcaccgttgacaccaacaaggcgcttttggacagggtctgcgagcttgcgcatacagaatatcagaaggaccacgagacagatgtgtccctgcgcattgttacagaccatgttaagtcctgtaccttcatgatttcagacggaatcatgccgtccaacgagggaaggggctatgtgctgcgccgcctcctgcgccgtgctgcccgccatgggagaaagctggggattgaaggcaggttcctggccggtctttccgagacagtcatcgaattgtccaaggacggctatcctgagctggaagaaaagcaggccatgatttttaaggtactgtccgaggaagaggaaaagttcaacaagaccattgaccagggacttagcatcctgggtgagatggaggatgagatgcagaaaaccggaaataagtgtctttccggagccaatgctttcaagctgtatgacacctatggattccctctggatctcaccaaggaaattttggaagagagaggctgcaccgtggatgaggacggctttgccgcagccatgaaggagcagaaggaaaaggccagaaaggcccgcaagactaccaattacatgggggccgacgtgactgtataccagtccatcgatccatctgttaccactgaattcattggttatgacagactgacggctgattccagggtgactgtactgaccacggaagacgagctggtacaggcccttacagacggacagaagggtaccatcatcgtggagcagaccccgttttacggaaccatgggcggccagcagggagatacaggtgttatttccaatgaaaacggctcctttaaggtagaggataccatacatcttcagggcggcaaggtaggccatgtgggagtcatgacaaaaggcatgttccaggtaggggaaaccgtgaccctgtctgtctgcgcccacaaccgcgctcttacatgcaagaaccacagcgccacccatctgcttcagaaggctctgcgcaaggtattgggagaccatgtggagcaggcaggttcctatgtggatgcgggcaggctgcgttttgactttacccatttttcagccatgacaccggatgagattaagaaggtggaggagctggtgaaccaggaaatccaggcatcccttccggtagtcacccaggttatgacactggaggaggccaagaaaacaggagccatggctctgttcggtgaaaaatacggagataaggtccgcgtggtgcgcatgggagatttctccacagagctctgcggcggcacccatgtgctaaatacaggcaccattgcatattttaagattatttccgaggctggtattgccgccggtgtaaggcgtattgaggcgcttacatccgaggggcttatgaaacattatcaggaggtggaagaggagcttcaggaggcggccaggacagccaagacaacaccgtccgcgctgacttccaagatacagtcccttctggaagaaattaagacccttcactccgaaaatgagaagcttaagagcaagcttgccaatgactccttgggagatgttatgagccaggtcaaggaagtaaacggacttaaggttctggcagccaaagtaaccggagtggacatgaacggcatgagaaacttaggcgaccagttaaaggacaagctgggagaaggcgtcattgtactggcctgcgagcaggacggcaaggtgaacctgatggcaacagccacagactcagcccagaaaaagggcgctcatgcaggaaacctgattaaggccatagctggtcttgtgggcggtggcggcggcggccgtcccaacatggcccaggccggcggcaagaatccggcaggtatcgacgatgctcttaaaaaagcggttgagacagtggaagaacagacaaaatagtacatgtgcagataaaatttaaaaataaatgtaagaattataaaaaaattcttgacgtacggtatttttatgctataatcatagcagtgctaaaaatacccaaacagttgtattatgcacaattacacaactggagggaggttaggtgtgagcgatgtcaaacgtaattgttaaagataacgagagcttagacagtgctttacgcagattcaaaagaaactgtgcaaaggctggcattcagcaggaaattcgtaagagagagcattacgagaagccaagcgtaagacgtaagaaaaagtctgaagctgctcgtaagcgtaagtacaactaattcactggttggattaggtgttaatgtaatggaaaatcaactggctgtcgtaagaaattatggcaggcagttgttttttgttttttaatgttatggctgtggggtacgtccgtggggaggggcagggctgtgtcctccggccgccacatgagaaaaaagcaaaggaagaattgaattgtttgcagagataggatggtcgtaatgattcgtgaaattgcgggatttgcttacgattgaaggatgcggatgcgttagcggatttttatgtggagctgcttggatgggagaaggtgctctccggtaatggatgggcggggttgcgctcgcatcagggatggattctggcttttcaggaagtggaagattatatcccgcctgtctggccctggaaaaaagggcagacaacagcagatggcccatatggatttttatgtccaggacctgaatcaagccgtttcccacgccctgaactgcggcgccaccaagtcggaagtccaatattttgacacctcaaccgtaatgttcgaccccgaaggccacccattctgtttgagtataataaaacaataaagtgacacctcaagttgagaaacctaaactcaagcatctgtctatacccggctgattgggatttataaacttggcggaagagatacacggtccgcctccccctctccgcggacgtaccctcacccaccaaaattcaaatccaaatcaccccacctcgttcaacgcacaccccggcgacgccaccaaagagtaattggtatggtagatcacgaatccaggcgcggctccggctgcctttttgatgttctttttctggatgtagtcgatttccaccttgtcgttgtcacgtcccttggaatagtaggcggccagggagccggcttcttcaaagagacggtcgggaaggtcggtgcggccctctgcctttacgatgacatgggagccggggatgcctttggcgtggaaccaccagtcattgcctgttgccagcttgaaggtgagttcctcattctggtagttgttctttcccacgtaaatgtggaagccgtcggaggaaatgtagtggaagggcttgctggtgattttcggcttcttatcgcttgaacggcgttttttgatatatccgtactccgtcagctcttccttaatctgcaccaggtcgttttcagccagggctatgtcgagagcggagctgatggattccagatggtcgatttccgccttggtctcctttgtcaggtctgtcagcgcttcataggtgcgctttaatttgttgtatttgtcaaagtgctttttggcattgtcctttgctgacagctgtgtgtccaggggaatggtgatttcctcgttggtgtagtagttcagacaggtaaaggatttctcgccgccggtgagctcatagccgtaggtgttcaggagttcgccgtatatgcggtatttttcacgcttttcagtgtctttcagctgcttcagctgcaaatcgtattttttgtagttgcgttccagggatgtctggactatccggcgcaggtctgaggacttttggcggatcctggtaatggtgtcccgggaagcatagtactcctccagcagacggctcatggaccggaaggactggctgtggtaagcgccgccctcgtaacaggtcaggggaagggcagcgtattctaccgggcctccttcatcgaagacaatggccggcgcaaaatttccttccttcacgtcctccatcaccagggaaaaggtgtggtaaagatgcagaagttctgtttcagacaattctgaggcgccgtaatctgagtcaatgcttgccaggtggcatatttcctcggccataatgggactgatgcctgtgagatggttgtacagggctttctggacggacatggaggaggagcctactgcctggtggaaggtctcctgagtgaccgtaagcggattttctttggcaacggtctgggggatgaagtaggctcgtcccggaagtacctcgcggacagagctgacctgggcggacacatgcttgatgctgtcgatgatggtgccgtcctctctgcagaaaatgatgttgctgtgcttgcccatgatttccacaatcagtttcttgcggcacaggtcccccatctcgtccaagtgctccagatcgaactggatgatgcgctctaagccgggctggctgatgtccacgattctggcgcttccgatgtgcttgcgcagcagcatgcagaaattaggcgctgtcatgggactgggtttgttcttgtccgtcaggtagataaggggaagacttgcgctggccgatatctgaagacggtaattttccttgttatttttaatggctatgagaagctcgtccttttcaggctgggcgattttagaaatgcgtccgcctccaagggcttccttgaactcatgaaccaggtttgctatggtaatgccgtcaaatgccatatgatatacactcctgtcgggcctgtattaacgcgggaaatgccctttggataggggacggggaggaaccggaaggatcttctcttcggggcatgtccgggcgccggggccgctgaatataagaataccataatttgaaggaatagaaaaggccttgcattatcggatgtccatccaattttcccgccggctgaactgtaaccccgaaaattgctttgttgaacaatttgttgacttgattccccagatgaattataatactaactaactatggataaaagcgaaagagaggcattcgttatgttaaaaagcatgactggtttcggcagatgcgagaatgtgacggacgagtacaagatttctgtcgagatgaaggccgttaatcacagatatctggatttaagtattaagatgcccaagaagttcaattattttgaagcttccattcggacactccttaagaaatatatccagaggggaaaagtggatctattcatcaactacgaggattacaggtcaggcaacatgtgccttaaatacaatcgggcgctggctgctgaatatatggagtacttttataaaatgtcggatgagttcggtatccagaacgatgtgaaggtgtcggccctggccaagtttcccgaggtgcttaccatggagcaggtgccggacgacgaggagcatctgtgggaaatcctttcggaagcccttaaggaggccgctgtcagatttgtggagtccagggagattgagggagaacatcttaagaaggaccttttaggcaagctggattatatggaaacgctggtggattttatcgaggagcgttccccgcagattttaacagagtacaggaacaggctggaggacaaggtaaaggagctcttaaataacacagccatggaggagagccgtattgcggcggaagttaccatctatgcggataagatatgtgtggatgaggagacggtgcgtctcagaagccacatacacaacaccaggaacgggcttttaagcggagagagcgttggacgcaagctggatttcattgcccaggagatgaaccgggaggccaataccatcctctccaagtccacggacctttccatctcggacaaggccattgcccttaaaaccgagatagagaaggtcagggagcagatacagaatattgaatgaataagaatatccaaataagtacattgaaaagtcagggagagcataccatgaaccagcagggaattttagtggtagtatccggattctccggagcaggaaagggaacactcatgaaagagctgctaaagcggtatgacaattacgcattgtccgtatccgccaccacaaggcagcccagggaaggagaaaaggacggggaggattatttcttcgtcagcagggaatattttcagcagatgatagaggacgggcgtctggtggagtacgctcagtacgtgaaccattactatggtacgcccagggattatgtggagaagaagatggcagagggaaaggacgtgattctggagattgaaattcagggcgcccttaaggtgaagaagcgttttcccgacgcgctgctgatttttgtgacaccgcccagtgccggggagcttcgccgccgtctggtaggcaggggaacagagaccatagaggtcataaatgccaggctccgccgtgcggctgaggaggcgtcgggcatggaagcctatgattacctgctgattaacgacgagattgatgcatgcgtggagcagatgcaccagcttatcacactgcagcacagtaagacctgctatcatttggacttcctgagcaggatgcgggaagagctttatcacctggatgacagacagtaaaccatttacaaaaatcatataacaatttgaaaggggaatgtaatatgttacatccatcatacaccgatttaatcaacgtagtaaacagcgatattgagcccggagaacagccggtggtacagagccgttattccatcgtcattgcagcgtccaggcgcgccagacagctcatcgcgggggaggaccccatggttgccggagcggcaggaaagaagccgctgtccattgccattgatgaactgtatcaccagaaggtgaaaatccttccggaggaagagacaacggaagaggaagagcagaacgcataaatcataagccgtctcctgtacagggaagcattctgggtcattcccggtgctgctcggacagagatggcttaaatgttcattaggagttattttcatatggagaatataaagctattttgcgtatccctgggatgtgacaagaatctggtggatacagagaagatgctgggactgttaaacggacagggcatcatttttacggacgacgagacagaggcagatgtaatactgatcaacacctgctgttttatcggggatgccaaggaggagagcgtcaacaccatcctggaaatggcccggtataaggaggaggggaacttaaaggcccttctggtggctggatgtctggcccagagatataagcaggaaattctggatgagatacctgaggtggatgctatccttgggaccacttcctatgaagaggtggcaaaggtgctggagcaggtgctcatgggaagttcaggcatccacctctcctgtttccgcgatttgagcgagcttccccaggtggaagccaggcgggtggtcaccaccggcggccattacgcctttctgaaaatcgcggaaggctgtgacaagcgatgtacttattgtatcatcccctatttaaggggcccctaccgcagcgtccccatagagcagctggtggcggaggccgggcagctggcggaggcaggggtgaaagagctgattctggtggcgcaggaaaccactctttacggcaaggatctttatggggagaaatgtcttccgagacttcttaaggagctggcaaagattccgggtatctgctggattcgtattcagtactgttatccggaggaaatcacggatgagctcatagagaccatccggacagaggaaaaggtgtgcaactacctggatatacccatccagcatgccagtgaccggatccttaagcgtatgggacgcaggaccaacaaggaagaactgatggagcgcatcggaaaactcaggcgggagattccggacattgccatccggaccactctgatttcaggctttccgggagagactgagagtgatcatgaggaactgatggactttgtcaatgagatggagtttgagcgtctgggagtatttgcttattccgctgaggaggacacaccggccttctcttatcccgaccaggtgccggaggaggtgaaggaggagcgcagggacgagatcatggagctgcagcaggacatcgcgtttgaacactgtgagagcatggtaggcagggtgcttacggtcctcatagaaggaaaggtggtggacgagccggcctatgtgggacggacttacatggacgcgccgaatgtggacggtctgatatttgtgaacggggatgtggaactgatgtcaggcgactttgtgagggtcaaggtaacaggagccgctgaatatgatttgataggagaggtgtatgatgaatctgcccaataaactgacgattataagagtgtgtttgattccgttttttgctgcggccctgctgatcgaccatggcaataactataccatgcgtattgtggcaaatgtgctgttcattgcggccagtctcacggatctgtttgacggcaagattgccaggaagtataatctggtgaccaactttggtaaattcatggaccccctggcagacaagctgctggtttgttccgcgctgatttgcctgattgagctgggacagctccctgcctgggttgtcatcatcatcatcagccgcgaattcatcatcagcggattccgtctggtggcggcggacaacggcgtggtcattgcagccagctactggggcaaatttaagaccaccttccagatgacggctgtcatcctgctgatattcaatattccggctctgacgctggtgaccaacatggtggttgtcattgcagttgccctgaccattatatccctggtggattatgtggcaaagaatatcaaaatcctgacagagggaggcatgtagcatgacagtggaacttatatccgtgggaactgaaattcttatgggaaatattgtaaacagcaacactcaattcctggcggaaaaatgcgccatgcttggattcgatctgtttttccaggtcacggtgggggataattatgacaggatgatgtccgtggtgcgccagggactttcacgctctgacattctcatactgacaggaggcctgggtccaacagaggatgatttgacaaaggaggtctgtgccgatgccttcggcgtgcctttggaggaggacgcccataccagagagcatctgaccgaattcttcaggaataatatttacaggcacattccggaaaacaactggaagatggccacggtcccccggggagcggtggtgttggacaatgccaacggcatggctccgggcctgattctggaaaaggacggcaagaccgttatcctgcttccgggacctcccaatgaactgtaccccatgtttaacggacaggtgttcccctatcttcagcaaaagcagaacgcggtgctggtatccagtatggtgaaaatctgcggatacggcgaaagccaggtagaggatatgcttctggacctgattgacgcccagacaaatcccaccattgccacctacgcaaagacggcggaggtgcatttaaggattactgccagggcgggaagccgaaaggaggggctggccctcattgcgcctgtggagaaggagataaaagaccgttttaaggaagctgtattcaccacggatgagcaggtgagtcttgagatggcagtggcggatttgttgaaacagaatcatctgaccatgtgtactgccgagtcctgtaccggaggcatgatagcggccagaatggtgaatgtgcccggagtatccgacgtgtttatggaaggcatggtaacatattcaaatgaagccaaaatgcgccttctgggagtacgtgaggacaccttaaaagcctggggcgctgtcagtgaagagactgccagggagatggcggagggcggagtgaaggccagcggtactgacctctgtgtggccaccaccggcatagcgggccctgacggcggtacggatgaaaagcctgttggtctggtgtacatggcctgctgcctgaggggaaagacctgcgtcaggagataccagtttaagggcaaccgtgaaaaggtgcgggaacaggccatgatgaagtctctggacctggcgcgcctttgcatactgggtaagagttaaatatcaggcggatatagcagccttgtttattacgtgaaaataagttccgggaggaatggattttgaaatcaagacgaaggaagaaacagatttcagcggcctgccactatgcatatacgcggctggccctgaattactatatgtactatgaggtaatcctggaaggggaccttttaagcagcaggctggagagactgagcaaacggtatcacggtctgttaaaggattttctggagggaagcctggagctggaggagttgaatggcctgagggatgatactgcctcggctatggaggccaataccgcttatacggatgtttttcaggcgtatgagtacgttctgaaccgtctggaagggcgttttgagccccagctcatgggaaacagaaatgtccggccggatgaggaagaatggacagcggaaatcatggcttatattatggacacagatgagccaatggttgtcaacgaacgggtacagtccgtggtaggccagcttcccatacggcttaccaggaataaattctttgccatggtggaggaggggatgtctgtctataagggcggaccagtctccagcctggatgatatgctgtatatcctgcggtccgaggccatgctggtgcggccggaggatatggagacaggatacgaggaccttcactccattgtcagggaatttgaaaagacggattttaaggttatcacggcagaggaataccggcatctgacagccgagatggagcgggcaggacagattctcatggataccacaggggaactgatgctgttcatggatttgataaatgacctttatgtgcttatgctttccagaaaatgggccatgatggaggtatcggaggaaagcctgttaaaagaactcctgtcagaggttcagtctctttttgaggaaggggccgtaaaggccattccccgggagctgacagataagctgtccatgctggagggaaagcaggagacttattttgagcagtggatgcgtctggagacagaggttaagaacgcggcagacggcggggatgaggacggggaaattctcaggaagatagaactgctcatgtcggacagctccttcatgtccctggagcgtcccggagacagggcggaccagaaggtggatgaagaactgatggccggaaagctggagcgcttctttggagaactgtcagctgcctgggagggaaaaccaaaggtccttgtcagggctgtgatgtccaagattctgtccaggctgccagtctttttcgattccctggaggaagtgcgtctgtatgtggaaggaagcctcagaagctgttccgacagtaaggaaaaagagatttccatgcgtcttatacgcatgttgatagaacaggatatatttgacctggaagattattaggacgcgttatggcggaaatgggtttcagacatggcctggcgcgcagacagagggagatgaatgaatgcgctggtgggagcacctatatatgggagacagggccgggcggcaccgggccagggtcctcatgggaatccgcgaaaggaagctcatgccggacacctatgtgattactcttcctcagagtgggaatcatatacttgacatacggcctgtgatgctgctgacggaggaagaacggaaggcagaggatttcctggttttaggcgtggcccagggatacggggaagcatgtgaggtagtccgcaccatggtggatgatatgtaccggcatacggatggttttaactggaaatcatatatgtcgtacctgggggaggcaagatgattcatattctgcttgtaatattgaagataatgggtattgttcttctggtcatcctggggctgctgcttggcattctcctggcagtgctgttcatacctgtaaggtataaggcagagggaaattaccacggacagctgctgctgtcggtctgcgccacctggtttttccatattctggtattcggggctgtctatgaaggcgaaggcatggcgtgcagtctcaaggttctgggcttccggctgtggcacaatggggaaaaggatcctgcccgggatttggaggacggtctggagaccatactgggagatgaagaacagtctctgtatgaggaactccagcaggatgaagagcattacaggaaggctcaggaggaacacaggaagaccgatacggatggacgggccgatgacggccggtcacgggagaaacaatcgaatgacggccagtccggcgggaaacaggctcatggcacacaattccatggggaacacgtgggagggcaggacaccaaccggagggaaagccgggcagaggaagataaaacagggcctgagcctgacaaacaggggtccggcgtcatggaaaaaataaaaggcatcgcagcccgtatcagccggtcaatcagacatatactgggaaaacttaagttttcttttgagaaaatttgtgataagcttaaaggaatcagggaatttgttctggagaagaaagtctggctggaggatgaaaagaaccaggcatccttaaggctcctttacaggcagacaaaacttctcctcaaacatctgtggcccagaaaaggcaggtgcaccgtcaccttcgggtttgacgacccctataccacggggcaggtgcttcaggccgcaagccttatctacccattttaccacaggcagctttttttgtacccggtatttgatgagaaaatactggacgcagaggggagtctgagggggagaatacggttatccgtaatcctttggctggtactccaggtcctgtttgacggacatacccgcaggatgctgaagggtttcttaaagtgatatgacactcgcggcggctgccgggggatgggaaatcctgtcccgccggcagcccgcgggaataaatagagaagagggcatactatggcagagaatcaatttacatctacgatagacacgttatttagaggcatggaccagttcgtcagcaccaagaccgtggtgggggaaccggtacaggtgggagatacaatcatcgtccctctgattgatgtgacatgtggtatggcggccggaagctttgcagagggtgtcaagcagaaacaccggggcggcggaggcatgagcgccaagatgagtcccagcgccgttctggtaattcagggaggcgtgacaaagcttgtcaacgtaaagaatcaggatgccatcactaaggtcatcgatatggcgccggatttcatcaataaattcctgggggggaagccggccgtgtctgaggaaacggtccggaccgcaaaggatacagcggcagtctatgacacgggtaaggcagaacatatggatgtgaaataggaatcctgggccgcctttctgcatatgatggaatatagcttgttgcagaatgggggagacaattaagatatgagaagaatatgcgggcttatgctgttctgctttggactggggatggcagtgctgctctttattccggagacaatctttaccttcctgttcgttatcggctgccttgtattaggatataatctgttctgttgttaatataaacgtatggcgtatcgaagaggaagaaggttacaatagcaattgaattaaaatacaggttatgcgtccatcccatgggcatggcctgttttttgctgcctgctttatcccgtcaggaaaaaagattgaaaatccccaaagtattccacaaaaaaagacaccgcccgtcttatgacagaggcaatgcctttttccgtgatatgttctgtttcattaagctctttctacaaggcctgaacgtaagcaggaagtacatacgtacattctctgggttccaccattaaccttgactctgacagatttaacgttcgctttccacatcttgttggatcttctatgggaatggctcacttgaattccgaaatgagctgccttttcacagattgcacacttagccatactattgcacctccttaacacgtaacttggattctttctttaagaaaaatccacaacaaatgtatgataccagaagtttgcaaattttgcaagtgaaaaaattaaaatttctttctttttttcagaaaatagtgtatactgtctctagtaaagaaacggaggcatgtgtatgaagggacgaatcagcaataaaatgggcgaaatccagattaacccggacgtgattgctttatatgcaggaaccatcgcagttgaatgttttggcattgtgggtatggcagcagtcagcatgaaggacgggctggttaaacttttaaagagagagagcctgacccatggaatcaacgtggatataaatgataataagatatccattgattttcacgtaatcgtatcttatggggtcagtatttcggctgtatctgacaacttgattgaaagcgtgaaatacagagtagaagaattcaccggcatggaggttgagaaaatcaacatctatgtggaaggtgttagagtgattgactaggaggaagtaacttgtgggtataagtacgattgacgccggtatgcttaagaatgccttcctggcaggagcaaaggggttagaggcaaaaaaggactggattaatgaactgaatgtatttcccgtgccggacggggatacgggaaccaatatgacgcttaccattatggcggcggcgagggaagtggcggagcttgagaaccctaccatggaccagctggcaaaagccatttcatccggttccctgcgcggggcaagaggaaattcaggagttatattatcacagcttctcagaggctttacaaaagaaataaaagcagtggaggagattgataccaccatcctggcaaacgccatggtgaggggaactgaaacagcatacaaggctgtcatgaaaccaaaggaaggaaccattctgactgtggccaaggccatggcggataagggcctggagatggcttcacagacagatgacatggaggaatttgtaaaggaagtcatagaatacggcgattacgtgctgggccagacgccggagatgcttcccgtgttaaaacaggcgggtgtggtggattccggcggacaggggctgatgcaggtggtcaaaggagccgtggacggccttctgggcaagacagtggacttttccctggacacggtactggacagccggaaaacgcctgcagccggcgcaggagccgctaagggcgccgcaaggacggacatagatacggcagatatcaaatttgggtactgcaccgaattcatcataaatctggagaaagattacacggataaggatgaggcggagttaaagtcatatttggaatccattggtgattccctggtagtggtatcggacgatgagattgtgaaggtgcatgtgcacaccaaccatccaggcctggcctttgagaaggcgctggcctacggttctttatcccgcatgaagatagacaacatgagggaagaacaccaggagagggtcattcaggattcggagcgtctggccaaggaacaggccgccggggagcaggccggcaaagatcaggaatccggggatgaggcttcatcagaacgcagggagtatggtttcatagccgtatccagcggggaaggactgagcgatattttcaggggaatcggagccgactgccttattgagggagggcagaccatgaatcccagcacagaggatatgctaaaggccattgaccgggtaaatgcagagaacattttcatcctgcccaacaacaagaatattatcatggccgcacagcaggccagggatttaacggaagataagaacataatcgtcataccttccagaaccgttccccagggaatcacggcattggtcaatttcatgccggatttgggaccggaggaaaatacccagaccatgaccgaggaaatgggaaatgtaaggactgcccagattacctatgcggtccgaaccaccaatattgacggtattgacattgaagaaggggatatcatggctctgggagaccatggtatgctggcagtgggaaaatccgtggatgcggttgccctggatgccatgaaagagatgctggatgaggaatgtgagcttgtgaccatatactacggtgcagatgtgtctgagcacgaggcagatactctcagggctcaggcccaggagcagtatcctgataaggaaatcgagcttcagtacgggggccagcccatatactactatctgatttctgctgagtagaaggaagatgttccgggagagcctggaggagctgatacgccttctccaccggcccctgcctcagggacaggaaggcacgggaagcggcgtcattaccatatatgtgcctgaccacggggcatgccaggaagggcggctgtgatactggggtccattgccatggcggcagccatcatcggatatatcgtcaatctgatttttgtatttacatttatattctaaaataaaaggagcggatgactatgaatgaaaacatgatgaacagatcttatgaagttcaggtagagggagactccctgggacgctacacggcaaagacctttggctggatgtttgcaggacttttgattacttttattgtcgcagtcggctttgcgatgacaggtacgattttctatgtatattccttccggtactggcctctggctcttctggcagctgagctgggagtggtgatttatctctcagccaggattgagaagatgtctgtggggatggccaggagcttattcttcctgtacgctgcccttaacggtattgtattcagcgcatatttatttgccttcagcctggagatactgtggatggtattcggcatcacggccctgttctttggaatcatggccctgattggatggtttggcaatattaattttaccaaactccgtcccttcatgattggagggcttgtattcctgtttttctactggatttttgcaatgttcattgatttaagcgcatttgataccattgtatccactgtgggaattttcctgttcctgatactgaccgcttatgatgtgaagaagatacaggcattccacgcatactacggccagatgcctgagatggcagccaaggcatccatcttctctgcactgcagctttatctggattttatcaacctctttgtctatattatgaggattttggggcggaggaagtaagcagggatacccacatatacttaaagaagattatgattatccaaggggtgcattgacgtgactggattatggttgcggcgatgcgcctttttcatgatgtgttttgcatacagacaggaggtaaaaatgaaatatgtattgggctttgacataggcggaacgaaatcagctgtccttctggccagtccggataaagaacatgtggtatttctggagagaaaatccattcccactcacgggacatggaaggaagtgctgggctgccttgcggatatggggaaagcctttctggaaacgcaccggatatccagggaaaaatgctgcctcggcatttcctgcggagggccgttagacagcggcagaggcgtgattctgtcgccgcctaatctgccggggtgggaccaggttccggttgtgtcctatctggcacagcgcttgggcatggacgcaagacttaagaacgacgcggatgcctgtgccctggcagaatggcggtatggggctggcaagagctgccgacacatgattttccttacctttggaacaggactgggggcaggattgattttaaacggaaggctatacgaaggagcatgcggcatggcaggggaagcggggcatgtacggctggcagaggacggacctgtgggctgcgcaaaggcaggaagctttgagggattttgcagcgggggaggaatcgcgcggctggccaggtccatggcagaggatgcccttatggcaggccgcgcggtttcttacatgaaggatggagggctggaaggtattacagccagagatgtggcggaagctgcggatatggggtatgcagatgccagaaacgtcctggcagtgtccggccggtattttggccggggtcttgccatgctggtggacattttgaatcccgagaggattgtagcaggaggaatctatgcaagggccggcagattcctcaaggaagagatggaaaaggagcttcggagagaggcactcccagccaatgtaaatgcctgctgtatcctgccttccggcctgggggaacagattggggattacggggctgtgatggcggccatggagatatgggaggagtaaggaagccataaggcatttgcaaatttagttgcctaagaagtcaaagactgttataattttcatgtcagatacattgtttcaaaagtatatattgaaataatatatttcagaaaggggagcatatatgttaattggagcattggaagcaggcggcacaaagatggtgtgtgccgttggaaaggaagacggcaccatattggagcaggtatccatacctaccaccacgccggaggagaccatacctaagcttatcgaatattttcaggataaggagattgaagccctgggtgtggcggcttttggccctgtggatgtaaagccggagtcagagacttacggatatattctggacacgcctaagctggcatggaggcacaaggattttctgggcaggcttaaggatgagctcaaggttcccatgggactggatacggatgtaaacggctcctgtctgggagaggtgacatacggatgtgccaagggactggacagcgttatctatatcaccataggaaccggtgtgggtgtgggcgtatgcatcaatggaacgctgctgcacggaatgcttcaccccgaaggaggccacattcttctgacgcgccatgaggatgacccaacgggcggtatctgtccttatcacaaaaactgtctggagggctttgcaagcggtccctctatcgaggccagatggggcaaaaaggccgtggaactggtggacaggcccgaggtatgggagatggagagctattacattgcccaggcccttgtggactatattgtgcttctttccccccagaaaatcattctgggcggcggagttatgcatcaggagcagctgttccccatgattcgccaaaaggtaaaggagatgttaaacggctatattaagacaaaggaactggaagacatggacaactacattgtcccggcaagccttcacgataaccagggaatcatgggatgcataaagctgggactcaatgcattacgggcatgacttcctttggaggattttgatacatgttgaacagacagccggtaaactcgttaaaaggaattggcgagaagacaggcaaactatttgaaaaactgggggtcgtcaccatagatgaccttctggcctattatcccagggcatacgatgcatacgaggctccggtgcccatagggcagttaaaggagcagaccatcatggctgtggagtcggcgctggtgaggggagctgacctggtgcgcctgggccatatgcagattgtctcggtacagcttaaggacctgactggatccctccaggtatcctggtataacatgccttacatgagggcaaatttaaagaccggcgtgaagtatgtattccggggcaaggtggttaggaaaaggggccggatggtcatggaacagccggaggtatttaccccggaaagctacgaggtcctggcaggctccatgcagcctgtatacggacagaccaggggtctgagcaataagaccattgtacgggcgcagcagatggccctggaagtgcggaagatggagagggagtacatgccgccggatttaaggcgcaggtatgagctggcggaaatcaattacgccatggaacatatccattttccggctgaccagacagagctgctctttgccaggaaacgtctggtatttgacgagttcttcatgttcctggttggtgtcaggcgtctgaaggagcacagggaggacaggcattctgcctttatgataaaggaggcggaagaggtgaccgcctttcaatccagtctgccatacgcccttacaggggcgcaggaaagggctctgagggaagtatatgacgatatgggaagcggcctggtgatgaaccgcctgattcagggtgacgtgggatccggcaagaccatcattgctattctggccctgctgcaggctgcatataatggataccagggcgcgcttatggtacccacggaggtgctggccagacagcactttgagtccatgaccagcctttttgaaaagcagggaattgaaaaggttcccgtgctggtcaccggctccatgacggccaaggaaaagcgtctggcatatgcaaagattgccagccacgaggcggacattataatcggcacacatgccctgattcaggaaaaggtggtgtacgacaaccttgccctggttatcaccgacgagcagcaccgttttggtgtgggacagagggagcttctcagcagcaagggacaggaaccccatgtgctggtaatgagcgccacgcccattccgcgtacactggccatcatcctgtacggagatttggatatatccgtcatagatgaactgcctgcgggacgccagaccataaaaaactgtgtggtggatcctggctatcgtccaaaggcatatacattcattgagcgccaggtggcggagggccatcaggcttacgttatctgtcccatggtggaggagagcgagatgattgaggctgagaatgtgctggattacaccaaggccctgaagaaagcgctgccgccgtccgttatagtggaatatctccacggcaagatgaagggcaaggagaaaaatgcccttatggagcgctttgcggcgggagaaattcatgtactggtatccaccactgtcattgaggtgggagtcaatgtgccaaatgccacggtgatgatgattgaaaatgcggagcggttcggcctggcccagctccatcagctccgcggacgggtaggaaggggaaaggaccagtcctactgcattatggtcaactgttcccgggatgaaggggcaggagaacgcctggatatactaaaccgttccaatgacgggttttatatcgcctcagaggatttgaagctgcggggaccaggggatatcttcggcctgcgtcagagtggggacatggaatttaagctggcagatatatttacagatgccaatattttaaaaaaggtttctgaggaagtgaaccggcttctggatgaggatcccgggctggaaaaggatgagcacagggagttgaagcggaaggtggaggagtatctgggaaccaattatgaaaagctgaacctgtaggggattttatatgagcagtcatattaagaattgctgtataagaacagaaaggagtgttttaccatgaatgagacactgaatacgattttgaccaggagaagtaccagaaagttttcagacaagcccattcctgaggatgagatggagctgattgtacaggcagcccttcatgcgcccagcggaatgggactccagacatggcagtttacggttgtgagaaacagggagaaaatccagatgctggcagcggccattgaaaagacgctggaccgtcagggatatgatatgtaccagccccaggttctggttattccatccaatgaaaaggagagccgcttcggcagggaggacgatgcgtgtgccatggaaaacattttccttgccgcccattcccttggaattggttctgtgtggattaaccagctccagggaatctgcgatgagccggccatccgtcagatactgacatcctttggagtgccttctgaccatgtggtatacggtatggcggctcttggatacgcggcagacactaaggcggataaggcccgtacaggtaaagtggtatatgtggattagtctgcatatgcgcaaattatatatgcatgacaaaataggtatgataaaatccccagactgtgtttaacacatagtctggggattttctgctgtctccagcaatgttacaatcttactttagaaatccttcagaaagggaggatttatttacctgccatctgacgctcctgggcttcaatcatcttcttaaccatatagccacctacggaaccattctgtgcagaagtcaggttaccattgtatccgttggttaacggtacaccaatctcgttagcaacctccatcttaaatctgtccattgcttcctttgcttcaggtacatttgttctgttagaattgttagacataataaaacgcctccttgtattatatttgccatgaaattgtttagtggttcatggcttgttttgtgttacaatcctattatgtgatgatttaaaaattataaactagaaggttcttcgtattttggttaaaacaggaaatggccttttttgttcttatagacatttgaaattgtttgaaatagtatagtagaagctaatatttatttttaaggaggcatcgttggatgaagaaaactatgacagctacggcggctggaactgccgcaggaatagccggactgctggcagagaatatttttttcatattgccctggatgcggcagcgtataaatcagccctgttaaaaccagcgcccggcacagagaaggcagaaaaaaggactggagagggaaagaaatgccgaaagaaacagtaaaaatactgaaagcacggtatgaggaacgggaaatcgtgtcctttgaccatttaagacttcatggttatctgtgtgtgcagagtgaaccaaatagaaaatgggctgtattggtccatgaatatgatgattccggtttgtggtttggaagagaagcgctggctttttatcaggcgggatttaaccttcttctgccggatgcgagaggtcatgaaaaagccagggcgcataagtacagtggagacagaaacacagtaaaggcggcaacacacggtgaaacaacgcaaatccgttgatttttaacaaaaatattaagagtattaaaaaaaatgaggttactagaagggcaggttttggaactaaaatagttgaaaatagtaggtttttatgcgggttcacgggcttttgaagccttccgcaaccttgtatttttcacagagtcgggaaaaggtatgacggcattcatgaggtgtatgttttggctcatttagtatgttgagctgtaggttttatgcggcttgcagagtttcgcaattacctaaagaaaacagaaagactgtaaggagctgccgaagcagctccttacatattatctccagggccaaaagatgttgcggtcacgtctgtccctgtagtcatcacgcctatcgtggtcacggcggcatggaggacaggggggacaaggtgggcaactaggtctacggcgttggcattgaataaattgttcaaaattatcacgcattgggttacctcctttaacatctatcaataggattgttaatcaaagaggacactctgaattcgtgggtatgtccatcctgaaaagtcgtgcgggccttcgcaaagtgaatatgccttccatcgcccacaggtatagcaggagaagatgtcccgctaaattcgtgaaaatgcccgtcgtaagaatcagtaagaaatgttaccctgtgaacatggcttcccatatagggtattgcctcaccggatacagttgcaaaacggtgattatgagggtcatcacagcgttcggctatgagggtgcttcccaagatttcgtgcacatgctgcatgctgcaagcattcgtttcattcatttttgtttgctcctttcttttagtgtaatatatcatatgcaaaaagagatgaacgtgtgacaagccaaaagaacgggtggaaatgacaaaattgagtccatacagagcatggcggaccaattgaggggaaagaagaacgggaggagacaaaaaatattccgggtttcataaagaatcgggcatggacagggaagcagttctttccctacgtcaaggacatcgtgtttgatggggacaatgcgcaggcaaagaccgtacaggccgtaggaccccacggcttattcgagacctggcggaaggagtgtatggaatataggaagaacctcttcgtgcggctgctgatggacgcaagtctggcttccgttctgaggaacggatatccgcctatgtacggcaacactgaacagtaccacacgaaggaatccattaagaggcggattgaggctatggaggatgagagggaaatggaaagttggacagatattaaacgactaaatgatgctttaaagagccacctcctggcggctctctggcagaaggcattgaagctctgcgacatcgattatacccctgtctcggcagcatacacccagggcttccagttggcggcggacgggcaacgctggtggtgccagtttgcggatggcagctatgcggccaatggctggtactggctccgagaggccacagacggcacatgcggctggtacctattcgatgctgagggctacatgctgaccggctaccagacggatgcagccggggacgcatttttgttgtgtccgggaattttcagtcataaatattaagagtattttaaaggattttgcttgtacatatgatatactggtacataagtgaaattatctaaggaggaaacactacatggattacagaatgttgggagatatactgccggccgttgaagttaggctgcaggcgggagaagctatgtatacgcagtccggaggaatggcctggatgagcgacggttttacattggactccaatgtgaaaggagggcttatgaagggactgggaaggatgttttccggcgaatccctgttcatggctacctatacggcgtccagaccggacagcgttattgcgtttgcatccactgtgccggggaagatattggcaatagatacggcaaagaccagcctgatttgccagaagggagcattcctgtgcgcacagacaacggtcgaaatcaacaccgtactgactaagaagtttacggccggcttctttggcggagaaggcttcatccttcagcagatacagggaagcggcatggcattcctggaggtggacggagatgtggtggagagggttctggcaccaggagaagtgattaaggtggatacgggaaatgtattcgcctttgaacccagcgtatcctacgaaatcgagacaatgaaaggcgtgaagaatatcctgttcgggggtgaagggctgttcctcacaaaactgacaggtcccggcaaggtatacatgcagaccatgaacattgctgaatttaccggacggattgcccagggacttcccacttccaaataatgagggaaatgttgcaaaaatcctaaaaaaacccttgtatatctggaattttcatattatacttgtttggtatgaaaattgctgtaaatgtgcagcgtatggaagcgggagtaatgaatgagagtaatcgcaggcagcgccaaaaggctgcttttaaagacactggatgggctggataccaggcccaccactgatagaattaaggagacgctgtttaatatgcttcagccggatttgccggactgcatgtttctggatcttttttccggcagcggagccatcgggattgaagcgctgagccggggagccggtttggccgtgatgattgagaacaatccaagggcattggagtgtatccgcgggaacctggcgaggacaaagctggagggcagggccatggtgatgggctgcgatgtgataaccggactgaaacgcctggagggcaggaattacaggttcgatattgttttcatggatccgccctatcatcacgagtatgaacggctggttctggattacctgagccactcccccatggttacggaggataccctgattgtaattgaggcatccagggaaactgattttggatggctggaagaatccggctggcatttgataaaaagcaaagagtacaagaccaataagcacgtgttcgttggcagaggagagtagatgaggacagcagtatatccgggaagctttgacccagttacattaggccattatgacatcatagagcgcacagcaaagatggtggataaattaatcatcggggttcttaacaataaggcaaaatgcccgttgttttctgcccaggaacgtgttaatatgttaaaggaagtgactgcgtccctgccaaatgtggagattcagtcttttgaaggtctgctcattgactttgtgcgcgggagccatgcggatattgtagtcaggggactgcgggccattacggattttgaatacgagcttcagatggcgcagaccaacagggtcattgcgccggagattgatactatatttttgactactaatttaaaatattcatatttgagttccagcatcgtgaaagagattgcggagtacgagggggatatcagtgagttcctccatccggtcattgcagccagggtaagagagaagctggaggagaggagacggttgacatgatgagtaggatagagcagttaatcagtgaaatcgaggaatatatagacagttgtaaattccaggcattatccaacagcaagattattgttaataaggaagagctggaggagttgctggtagagctgcgactcaggataccggatgaaatcaagaaatatcagaaaatcatcagtcagcaggagaccattttaaatgaagcccaggcccaggcagacgccatgctggatgatgccaagaagcaggctgattccatggtagcccaggccagcgaacagacttcggagatgattaatgagcatgaaattatgcagcgcgcatatgcccatgccaatgaagtggtggagcaggccagcatacaggcccaggccatcgtggactccgccgtgaacgatgccaatggaatccgccagagttccatccagtatacggacgacatgctgcgcagcctccagaccatcatcaaccataccatggaaggtgcaaagggacgtttcgacgccttcatgacttccatgcagtccagctatgacattgtttcctccaaccggaacgaactgtcaggcggcattgtgaggccggaggagggcgagggccaggcttctcaggagatggatgacggccagcagaaggcgtaggttaccggtacagggatacataaaatatgagacaggacagcgcgctgtggagaattttccacagcatataatgccggatggacaatccggcattttttaatacgctttttgtctgaaatatgccggagaatccgccgaaggcagcggaaccaatgataaggagggctcccatctttccgggcacagaggatgcgataatctggatgccggtggtgatttccacacttcccagcagggccgggcggagcaggggaggcatctgaaagggaaacacggtcagatacagggccaggatggagaacagcataatatagcctcctattttcaccatggtctcaaagcagctcatcatgtgggtgtcaaaggaaaagcaggctgtcgtctccggttctgagcaggccgttgtccccggttcggactgtgctgttaccgggtatgtttcctcaaggggctgtcttttgtaatgatagcagtatctggctaacatggagatgggaagtatgggcagatacagggccgccaggacagccatcagcgggcagggaggcatcatggagggaatcagggcaatctgggccattacatatcccagcacaaacatgggactgggatgattgctgatggccagcaggtatttgccctcccgggcagagagccttccctggtccaaaaagtcgctggtggtcttggcgcccatgggataaccgcataaaagcccgctcatgaggcagaagctgccctgatctgacagggacaggatacctgagaggatgggtttaaaagggcctgtgaggatgcggatggcatccatggccacgatgacgccggagcatatcatgaagggaaggagggttggaagaactacatttccccaaagtacaagaccctgcctggcaccttccagtgcaagtccggggttgaacagcagcatgagcagacagaggacagacagaatgcctcctatggattttttcatacgcacctgaatacaatggtttatacaaatatattgtaaagggtggcgggctatgcctttgattcttattttgctgctggcggtattccagtgttccattaccaattatctgattacgaatccggattattaccagctggggccgtattcctgggagagtaatgatttcagggccatgcgtctgggggatgccgtggcagggcttgacagcctggatacggatatggtcactaccctgatggtggaacacgattatgaccttacaggtctcaaggacaccagatataacaacaggctgctggctgctgccaggccagcggattacagaaagctgaaacacgcatatgagaccgtcctgggggatttaaagtattttccaatacccaaaagccggaataaggacacgccggaggtggtttttgaggacggctggatggatgggcgggggtatgtaagcggcggcggtgatggcggcggacggggagatggtcaggcagaaagcggccaggagggcggaggtcaaacggacaacggccaggaagacagcggccggcaaaacagtccaaaacgccgccatgaaggctgcgatatcatgggagcaaaaatgccgcccggatattatcctgttgtcagcatgacggacggagtcatcgaaaaaatcggatggctggagatggggggatggcgcataggcgtgcgggctcccgggggagcctatctgtactatgcgcatctctatagctatgccggggatttgaaggagggggacagggttaaggccggggaactcatcggatatatgggggatacaggatacggaaagacagaggggaccagagggaattttgatgtacatctccatgtgggaatctatattaagacggaccacaatgaggagatgagcgtgaatccttactggattctcaagtggctggaaaagagacggttggtgtttacatattagggggccgcttcctcacacgccccaaagcaccaaaaagaatctcacaggccctgtccatacacaggactaccgtattgtcgtacaggaaggcgagggccaggctgatgatcagggtaagcagaaaggatgccggtatgccgcctgcaatcccaaaggacaatccattaatgccaaacacgtcatccacgatccggtgcagcaccagccagtgaaccaggagaatggagaagctgtacctgcctatggcggaaagcagggtgggaatccttgcaaacagagagtccccatgctttcggaagaagagaaacacggcgcaggtaaagagcatctggggaggcgcgttgttgtaaaccaatgggcccaggctctccgaggccatgatggcagccgctattgccagccctgacagcaggcctgctgtcatgaacagccggtaatgtttcatggcggactgggtggtgcagtaatatcccagcaggaaaatggaatcccatgatgccaggaaggctgaggccgcaaactctacacgaaccagggggccataggtgtagatgaaatgcaggataataataactgcggtcagcgcctccagaatgggttctgtcatgtgttttaacatgattcggaaaaagggggctgcaacgtaaaacatcagaattatatacaccagccagaaatggggggtctggccgctgtcattggacaggaagctttgaatcaggcttccccagtttccgggactgagggcggaaatgccttccacgtaaaagaagtaaaacaggtaataggcaaaacagggtatcagcactctgacaaagcgcctggaataaaattcaaggacggattcctcctttcctcccagcagaagcgccccgctgagcatcatgaacagcaggttgcagcttaagccaagaccagccgaggccgccatcacatttctggtaaaggtatggggagggagcagggcgtaagccggttccaatacatgaacgaggatgaccagaagggcagccagtaccctcagatagtccatatatacaatgcgtccgggcttattctggtatcctaagaacagctcccttgcataaccggaggaagccccggcccgcctgctgtgaatcaggcaggagtatacggcgagtacagcggcggcggcataatgctttgggcgcagcgcccggatgggaaggccgtaacgaagctccatgagcatatatataagtgtggtcaaaacaaaaaacaccaatccgtagcgaagtttctttccattcatatagagtgcctccctgccaatcatgtaaaaatgccttgcaaatgtccatccaagtctgatttttccagtataccattaagcggataaaaaacaactggaatattccatgattttgtattataatgatgcctgctatttttggaaaggtagaatataatgcaccggatggaatcatacatgacacagccggctatatggcagtcatttacgcagggctttttgcgacggctgcctacaatggactggctgctgtccatcgggattcccatgggccttcagttttccataacagccataggcactatcatcgtacagggggccgtcaatgcctttgggtccgtgtacattgccggtttctcggcagcgggtaagattcaaaacattgtgtccactgtttttgtggccttcggggctgcggcagcgacctatgtggggcagaaccggggcgcgggccgcatggaccgggtccatcagggagtcaagtccatccagatcatgattctggtctggagcgctgtgatgattctggtgatccatttattcggagacatgctgattcgcatatttattgatgcatcggagacagaggtaatggatgcggccagtacgtatttcaggaggcatgtttgaactggttgccagggcagccattgtggcggttgtggcaggaagcctcggatatatgggagtgtgcctggcggatcctgcggcctggctggcggccctgatccccattgtgccttattacttttataaaatctccaggatttcccgggaagaaacctgtggtggcacaatcacggcggatgtgatatgataaaaacgattgtggcagttcggtcctgtactgtcataaagaaatgaggacggatgatatgacggatgtgagacggcttccggaggactttctgctgaaaatgcagaagcttctgggggaggaatacgggcagtaccttaaaagcttcaaagaggagtggaagccaggtctcagggtgaacacatggaagatagatccgcgggatctggcaaagctggtgccgtgggacctggagccggtgccgtggactgacaatggtttttattacgacgggtcgctggagggagaggccttaaggccctccaagcatccggcttattacgcgggactctattacctccaggaacccagcgccatgactccggcagccatgctgcccgtggttcccggagacagggtgctggacctttgcgctgccccgggaggcaagagcacggagctggcttcaaagcttaaaggccgcggaatgcttgtgtccaacgacatcagctattccagggccagggcccttctcaaaaacttggagctggccggcgcggccaatatctgcgtcaccagtgaagcgcctgaaaagctggcctgcgtgtggccggaatactttgataagatactggtggatgccccctgttccggggaaggtatgttccgccgcgatgaggatatggtgaaggattggaaggaaaaggggccggaatactatgtgcccgtccagcggcagatactgtcccaggcggcagccatgcttaaaccggggggatatatgatgtattccacctgtacgttttccgtggaggaggatgaggggaacgtctcctatatactggaggaatttccccagatggaattatgctgtctgggcctggataaagtgccgggagcctgcggcggattcgggctttccggctgcatgcggctctttccgcaccgcctaagaggagaagggcattttctggccctgatgcgaaaaaagggcggggatgatggggaggcccggactgagcacggcggggtgagaggaactgcggacaaggggattttccggtccacggacaaggggacactgccgcccatagaccccggaacagtcaggaagcgggcccgggccgtggagaaggaaaaggagctggatgtatttttagggcagagcggcgtggaatgggactatgggaggattgtcatacaccaggacaacgtctactatctgccggagggacttgcatggaacctgcccctgagatttctgcgcacgggactgcttttgggcgagcttaaaaagggacggtttgagccgtcccaggccctggccatgtccatgaaagccgggcaatttccaaatacagtcagcttccctgccggtgacagccgggttctccgctacctgaagggagagactatttccctggaagtagacgaggggccggtcaggggatggtgtctggcagccatggagggatttcctcttggctgggccaaaggtacgggaatgagcctgaagaataagtactatcccggctggagatggcagtagcaatccggctggagatggcagcagtaaaacaagcagtgggagggaacaaaccgatggctgataagggcaggaaaaacggaccgatgcgtcttgaccggtttctggctgagatgggatacggaacccgtacccaggtaaaggatatggtgaagaagggacgggtccgggtaaacgcagaggcggtaaaggacgcggaccggaaggtgaacccggaatcggacctgatagaagtggacaggagccaggtggcttacgccagaatggagtattatatgctcaataagccccagggcgtggtgtccgccaccgaggacaggaaataccctacggtggtggggcttatcagggaagccttgagaaaagacctgtttccggtgggcaggctggatattgacacggaggggctccttctcatcaccaatgacggggatctggcccataatctgctgtcgcctaaaaagcatgtggataaggtatatctggcccatgtgtcaggcgggctgccggaggatgccgtaaggcggtttgaggaaggaataaaactggaggacggcaccatgacgcttccggcaaagcttaagatacaggaagcggcagggagggagaaagaatggcaggaagtgctggtcaccataagggaggggaagttccaccagattaagcggatgtttgaggccctggggtgcagggtggagtatctgaaacggatatccatgggtccccttatgctggatccggaactgaaaccaggggaataccgccccctgacacctgaggaggagtattccataaaggattgcgggaaccgcagaaaccgtgtataactatataagagtcacagaaaacttgtcaacatgtttatagacagaggaaaatagggaaagatgaagttaaacaggaaaaaagcagttatatttgatttggacggcaccctggtggattccatgtggatgtggaaggccattgacatagaatacctggccaggtttggccttacctgcccggatgacctgcagaaggaaatcgagggcatgagtttctctgagactgcggtatattttaaggaacggttccagttaaaggagacactggatgagataaagaatgcctggattcagatgtccatagagaagtacagaaaggaagtacccctaaagccgggagcaggggctttcctggaatttatctcagggaagggactggtggccggcattgccactagcaacggaagagccatggtggatgcggttctggattccctggatatccgcaggtactttaaggtggtggcaacggcctgtgaggtggctgccggcaagcctgccccggatatatacctgaatgtggcggagcgccttcaggttgcgccggaggactgtgtggtgttcgaggatgtgcctgccggcatccaggccggaaagaatgcgggcatgactgtctttgctgtggaggatgcattttcactggagatgaaggaagagaaggaaaagctggcagattactatatcagggattattacgaattattggatggagcggcaggatgaaaaacgattatttacctatgaaccggaatgatatgagcatcaggggatggaagcagtgcgactttgtgtatgtgtccggggacgcctatgtggaccatccttcctttggcacagccatcatatcccggctgctggaggcccatggatataaggtgggaatcattgcccagccggactggaaggataaaaggagcattgaagtgctgggaaggcccagactgggctttctggtatcggcgggtaacatggattccatggtgaaccattattccgtgtccaggaagctccggaaggaggactcctatacaccgggcggcgtcatgggaaaacggcctgactatgccgtgacggtgtactgcaacctgatacggtccgcgtataaggatgtgcctgtcatcataggcggaatcgaggccagccttcgccgccttgcccattatgactattggtcggataagctgaagcgctccgtgctgcttgattcccaggcggacctgatatcctatggcatgggagagcggtccgttgtggagattgccgatgctctggacagcgggctggatgtgaaggatattacctttattgacgggacggtatataagacaaaaagcctggaatctgtttatgattataaaatgcttcctgattatgaggagcttttaaaggacaaaagggagtatgccagaagcttttatgtccaatacagcaatacggacccattttccgggaagcgtctggtggagccctatgggaatcagctttttgtggtgcaaaatcctccctccaagcccctgagccaggaggagatggatgcggtatatgatcttccttacatgaggaactaccatccgtcctatgaggagtttggaggcgtgcccgccataagagaaatcaagttcagcctgatcagcaaccggggatgcttcggcgcatgcagcttctgcgccctgaccttccaccagggacgcatcatccaggccagaagccacgaatccctggtggaggaggcaaagcttctgacagaggagccggatttcaagggttatatccatgatgtgggcggacccaccgcggatttccgtttccctgcctgtgaaaagcagctgacaagcggcgcgtgtccgggccgccagtgtctttttcctgaaccttgtaagaatctgcgggcggaccacggcgattacattgccctgctgagaaagctgagggctcttccaaaggtaaagaaggtgttcatccgttccggcatccggtttgattatgtgctggcggattccaaccggaaattcttaagggaactgtgtgagttccatgtcagcggtcagcttaaggtggcgccggagcatgtggcggataaggtgctgagccgtatgggaaagcccaaaaacagcgtttaccgccagtttgtgaaggagtataaggagatgaaccagaggctgggcaaggagcagtatctggtgccctatctcatgtcctcccatcccggttcttccatgaaggaggcggtggagctggctgagtatctcagggatttgggatatatgccggaacaggtacaggacttttaccccaccccctccactgtttccacctgtatgtattacacgggatatgactgccggaccatggagcaggtctatgtgccggtcaatccccatgagaaggccatgcagagggccctgattcagtacaggaatcccaagaattatgatttggtggcggaagccctgaagattgcggggcgcacggatttaatcggatatgacagaaaatgcctgattcgcccaagggacggatacaggggcggcgggacggtcccggcggcaggaaaggcaaagggaaccggatataaggcggccggccagggaagccgcggccagaagcctaagaagaccatacgcaacatccacaaaaagaaaggaacgtgacaggtatgaagattgctgtagtgaccggagcgtcctccggtatgggcagggaaaccatcatccagctgtgggaacattttaagggctttgatgagatttggattatagccaggagaagagagcgtctggacgaactggaccgccaggcgggggtacccctgcgcaaattcgcgctggacctgacaagggaacgtgacagggatgtgctgtcacaggcccttgtcaccgtgaaacctcaggtaaagtttctggtcaatgcagcaggctttggtaagattgggcgggtggaggaactgggcttaaagagcgagacggacatggtggttttaaactgtgaggctctgtgcgccgtaacccgcatggtgctgccctatatggaatgcaacagccggattatccagtatgcatcttccgcagcgttcctgccccagcccggatttgccatctatgcggccacaaaatcctttgtcctcagctacagcagagccctgaaccaggagctgagaagccggagaatctatgtgacggctgtgtgtccgggaccggtaaatacggagttctttgacattgccgagtccacaggtgtgattcctctctataagaggttagtcatggcaaatccaaagcgtgtggttcaaaaggccatccgggacagcattgcgggcagagagatatcagtctacggcattaccatgaaagtcttccggctgctgtgcaaggtgcttccccaccgcatgctgctggcagtcatgagcttcatgaatgaataattacctacgaaggagtgccgccatatgcagacactgacaattacccggaatgaagccggacagcggctggataagcttcttacaaaatatctgaaccaggccggcaagggttttctctataaaatgatgcgcaaaaagaacataactctgaatggaaagagatgtgatggttccgaacgtctggaggagggagatcaggtaaagctgttcctctcggatgagaccatagaaaagttttctgtaccggacatcagaaggtatgccggcaggaccggagacagcgggagtgcaggcacatccgccggagaaacggagagagcagtccgggaaaaaggtgtggaatcccgggaacacatgagctggaatggaaggaaacgtctggacattgtctatgaggaccagcatatcctggtggtgaataaaccatccggcatgctgtcacagaaggcaaaggacagcgacatgtccctaaatgaatacatccttaattatcttattgattcaggaaagcttcccatatcccagctgcgcacctttaagccgtctatctgcaaccggctggacagaaacaccagcggactggtggtggccggaaaatccctggcgggcctccaggttatgaatgaggtgtttaaggacagaagcatacacaagtactaccagtgtctggttgccggtgagataaaggagaaacagctgattgcgggcttcctgaaaaaggatgagagcacgaataccgttagcatttatcctctggaagtggagaacagcgtccctatcatgaccgaatatctgccgctgtccggcaacggaacattcacactgctgcaggtgaccctgattacaggaagaagccatcagattcgtgcccatctggcgtccattggtcatccgattgtgggagactataagtatggaagccgcagcttaaacgatgcagtgaaaaagaagtacgcggtccggtcccagctccttcattcctggaggctggtcatgcctgaaacacttcccgcgcccctggagtatctgaggggagaggagtttaccgccggtctgccggtgattttcagcacggttatggaaggggaggggattgggctgccttccggaagccggggcgattatcccgaaccggggcagggatgattattcctgacattatcccggaccggggcagggaattcttgacaggaattcatctttgggttatgctagataatgtttgaaattgccatttttttgctgctgttttcccgtgtggaatatggttggcggaaggggattttcatgcttgttctgtacaagcaaaaaacagctttccggccaatgatggcctgatgctgaggaaatgagagggatatatcagatgggaaagattatactgaccggtgaccgccccacaggacggcttcacgtaggacattatgcaggctctttaaagcgcagggtggagctgcagaattcaggagagtttgatgagatttatattatgatagccgatgcccaggcgttgacagacaatgcggacaacccggaaaaggtgcgtcagaacataatagaggtggctctggactatctggcatgcggattggacccggagaaatccgttctgttcatccagtcacaggtgcctgagctgtgcgagatgacgttttattatatggatttagtgaccgtatccaggcttcagcgcaatcctaccgtaaaatctgagattcagatgcgcaactttgaggccagcattccggtgggcttcttcacatatccgatcagccaggcagcggacatcactgcctttaaggcaaccactgttccggtaggagaggaccaggcgcccatgattgagcagaccagggaaatcgtccataagttcaacagtgtctacggggagaccctggtggagccggacatccttctgccggacaataaggcgtgtctgcgcctgcccggtatagacggcaaggctaagatgagcaaatcccttggaaactgcatttacctgtctgattccgaggacgagataaagaagaaaatcatgtccatgttcacggatccgaatcacctgaaggtggaggatccgggacaggtggaaggaaatccagtgttcatttatctggatgcgttctgccgggatgagcattttgaaaaatatctgccggattataagaacctggatgagctgaaagctcattacaccagaggcggtttgggtgatgtgaaggtgaagcggttcctcaacagcgtgcttcaggatgaactgaggcccatccgtgagcgccgcagggaaatcgccaaggacattcctgctgtttaccgcatcctggaggagggcagccgcaaggcagagcagaaggcagcccagaccctggctgagatgaagagggccatgaaaatcaattacttcgaggataaggaattgattgcggaacaggctgagcggttcaggactgagatggagtaggttttatacggctttatttggcttttgcggtatgcggcttcgtaagacattgattaagcatgagacataaatgaatggaaagctccggcagaaaatgctggggttttttttcgttacatggtacaatggaggagtaattgaaaaccaagggcaggacatagggaagaaggggagatatggaacgacaaaataatgaaatacagttggaattccagatgacaaaaggcgaattggcggaatactggctgttcctaaacgtattttcccggacagggtaactatggaccgcttcctggagcaatttcaaaatccgcaggcagtggaggatgatgggcatgttgtggagggcttatttaacttttatttctttatggaccagaaggcttggtcccatgcctggattcagggaatacaggtgggacttcgggtaaagaaattatacggtgtaaagagagataaatggttccgggtaatggaaatcatggcagcgttatgcggattgtgcattggtatcatactgaacaatactaccctgactgcggtttttctgaccttgcttcttttgagctatatgagggagcatgggatgtcagagtcattttacatgaaacaaataaggagtggatggatgccgtcaaaagggattggaaggtgggaactttccattggggaacatggaatctgcatgaagagggggctggaatttgcagggtacggttggaaggattataattgtctggctgaaactgaggacacattttatttcgtgaatacaggggcaggacgcgggatagagtgtatcccggttcccaagtgggtgtttaaggaccatggggaaatggatgcatttctcaatttctgccgtgacagaggtgtgaagtggagcggagtggataaaacagaggtccttcttaagaatgacaggatgctttatatcctgatagccctggtattattggctgtgctgatttccagtatcatccgggccgtgtgtttgtgagagccaggaaaagacagggacgagctttgggacgttttttagaaaaacctgttgactctgcccttaggtcagagcttatacttggaacagattcgaatcaggcaaacagaaaatgaatggaggagcggaaccatgctggccataggacagatgtcaaaggtatgtggggtgagcgttaagacactgcgtcactatgataagataggccttttaaagccccagagaacagatgagataaacggataccggtactacgaggactctcagattggcaccatgcttttgattggaaggctgaaacggtatggtttttcccttacggaaattcaggctctgcttaccatcccggacagcagggagttgctgcggcagctgtacaaacaaagattacgcctggagcggcagatggagtatatttccataactatcagggaaatggggtatcatctggaagaatttgaaaggacaggtgacattatgagttatcagaacaattatgagattcagataaaggaagcggaggaacaggctcttgttacccagagacacaagatgtcagtggaggaattcggcacatactatggaaagatatacgaaaaaattgccagggaacacatgaccataaacggggtgatcatggctgtctatcacgaccaggaatttgacccggcatacagcgatatcgaactgggagtgggtatcacggagcgggataaggctgactttatcatgccgggctgtctgtgtgcggcgactatccacaggggcccctattcaggactgccggatgcctacggcgccatcgtggcctggattaacgccaatggctatcatatgaatgggatgccttatgagatttaccgcaagaaccagtttgacaagcttccgccggatgagtgggagacagagattttctttccagtgaaaaagtaaagaacaggcaggcggtgaagaggttcccaaaaggctgccgtagtcccagaacataggggctgcgacagcctgcagatataagtttcaaatcatttccaaataaaattttcccttccggcgccaacctcaaaatggtatttcacaatgccaatatcaatttgggacatagggcgattatcctttgggcggatggatacggtattcccactagcttcgataaaaaaattctgtttgttgaataatttttccatgctctttgacttatgctgcgtaccgtcagtagtgccataaccaatcgcgatgacaccaaccagctcctcatggggagctaacgaaacaggacattttttcgcattgtatgtatttgtgacccgacacgagttaagacctgcttgttgagccttaaccatgagacgcgctccatagtagccacactccgcataaaaaccgtcttgctttttggctgccaaagcaatatagttttttacatttttgaatctcccgaaaaggggaatcatgcttttaaatgcctccccattttccgttactaactggatatgcagctgtcccagccggttacactggtcaatttcttctttcggtccatcaataaccgcaggtgagagtggtttcgttgtataattcctgactgcgtgtcttgctctgattgcttctgattccgtcataataagttcctcctggttttcaactcatgttacagtattaccttgttaaggagtattctttctgtaagagcgccccaatcaccattgtcatactgtacgcctttcatgttagccatagctgccagaccgtgtacggctgcccacattaccaaaaggtcgtctcttaactctttttcatcaatgtttagttccctcattcctctttttgcaccatttacaaaaatttcaaatggagtaaaggagctgttccatgtgatttcagtttcctttatttgaatgcccagatattcactgtcaaataagaaattaaaatagtgcggatactttgcaaaaaattccacataggccacgcccatagaaattgtaacattatgacagggattatcttcaactgcctgttttagagcggctgcgaatctgtcgatcacataagagtacattccccggagcagctcatcaatatttccaaagtgattgtagcaggcagttgctgatacacctacttgtttcgccacctttcgtaaagaaaatttttcaatcccccgctcatgaattagctcaattccctgttcgatgagcgtttcttttaaattaccaaaatgatatggctttttttctcttgtatgtgtattcatattacatcccctcaaattaacagatgttaacatatagtatattcatgatgttaacatatgtcaatataaacatttacatgaatgcgtcaagcttccataccgtttcccgtataacttgtttttcgattttatgaagatatccttaatatcccaaaaccttcattgacttgccctctttggtccaatatactggataatatagtatatttcatttgggcacagggggaatggaggcagtattatgaaacatttcggttggggaaggagatgggcagaaatggcaggggtcaaggcgggaatcatggcagggatttttctggttattctggggtgtgccgggtgcggtgagggacggcaaaacgcgcaggaagcatccagctttgtacctgcatatcagtttgccccaggatttggaatcatagcccattcaccgtatccggtgtatgttctggaaaatgaaagcggatattctgtcagcaggaatggggtgacagtggaattggtgcgtggaatgctgcagaataatgagatggtcgctgaactgcgtatattggactacaggaaaaaccgaatggagaatgacatggaggcgggttcccggagctttgatatgcgctgttttggaccgggaataccggatatggggtatacggcagagcggatgggaacgcacagcgaaaaccatgatgccggggacgccggataccgtgagattttggcagagttctgtaccacatccaagaagattgacacggagaaagggctggccggatattatttccagatagacggcctggatgaaaacctggaattttcctggactcaggccaaaggctacgagcagatttcggatatggaaggggctgtccggcatgaggacagatggatggtgccaagagcggttccggcaggagaaaaggggctggcagtggagctttatgcgttcagcgaaaacatcagtgaacagttgataccaggaagaatcaaccctttgagcagccaaaaggaggaaatcacccttttgggtgaagataaaaagatttacaggcagacaagggaatcactgcccatggtgatgaaccgggagccagaagtggaatacaggataaatggctcggacggacgtatatggtactttgacgttccggctgaattgcagagcggaagctttcagctttccgtgccttccgtcaccctcatatcttcagaagaatcaggggtgattatcctgcctttgactggggagaaatctggaaaagaaggtgtatcggaccgggaaatcctgtttaaggaccacggattggaaatcgtgtcaatggaagccacgggcggtaaggggacattcggaccggaaatgggagcaagtgatggtgaggggacaggggaatccctgttttgccgtctggagctcagagcgcaggcggcaaaaggcagcgggcagatggaaatggtcctgtgcagggttaaaacaaaggggacatcggaccaggatgagtggctggatgtaatgccggataaggagtccgtatcagaccctgacctgggcggccgctttatattttatctgccgtatgaggagggggatgactccattacatttcagctctggcatccgtattatgtctgggagcagcctttcagtctggagatatctgtgtcctgaagccatgtataagaggatgggcttttccgaaaaaaaggagtatctggtttactatttctagtttccggtagcttatcctgagattcatcctgagatccttccggtgattctcctcacatttccccctgcattctctgctgacggtgttcacagtgttccgtgtggccctttatctctttcatggtcttatccttgaattcgtccagcgtggcctgggggtcagctgtgagaagctcctgtatggcgtaatactttcctaaggacatcccgtgctggtgggcttcctcacacatgtggctgtccacggtggcatactctgcttttacgccatggcactgcattaaggctgtgtccacgcactcctgaaggcttgagagcatcttaaggtccctgtcttttgtttccagcgtgatggagacaagggcgtcttttttcagatactgctgcatggcatcgctgcccagcagaagcgccagtgcctcctcatattccaggtgtttcagcgaaagggtctggaggacggtctcgctttcttccccgtaggtggtctggcccaccacctttccccagcggttgatgtccagttcaatgccggggttcacgtctatgctgatgacggctgctttcgtgtagtacaggctgtaactgcccaggccgctggtggcaaagagcaggagacaggcaagggataccgcccatttcattctgcgcggcaccggctttcgctcttgacagatgtgtatatatggtattgacatttttatgtaaaatacccgcaatctccacggctgagtaaccctcataataatgcagataaacgatgattctgtatttatcaggaagcttcatcacggattccagcacatgggacagatccgggctttttgtatcagccatgctcatggcctcctacatctgattcctgccgcatagccgctccatatgtccggtactgccaggtgcagtaccgtttttctatctgtaatgtgaaccgcagccgcgtctgccatgagggctgtttccgccatggcatccataccctgaagtgcctggtgaggacgtctgtccatggtttttccgtccgggcatatccaatccccgtcctcagaccagcggccttcgcagtctccgtgttcgtggctcctgcagtattcatagtccgtacagccagcatatcctctgggacaggtccggccggcaccccatgcaagactgcttcccgctgcggttaatagaatgcctgtggctgctgctgtcattatagttctgattttcatgtttttcaatttccttttttgattcgttcactattaatacgataatacgattgaggctccggaatcctttccgttactttatatttttttgaaattgcggtgcttgtgaaatatccttgattttgatatacttatctgatgcacgggatagagacacatgggaaacactatcctgcaaatacagaatacataaaaggaatgaactgacatgggtacctggaattccagaggattaaggggctctacccttgaagatttgattaaccataccaacgatttgtacagggaaaagaagctggctctgatacagaagataccgacgcccatcactcccattgaaattgccaagtccagccgccacatcaccctggcctattttgaccagaagagtaccgtggactatatcggggccgtgcaggggattccggtgtgttttgatgccaaggaatgcgcggtaaagacatttccccttcaaaatatccatccccaccagatcgaattcatgggggaatttgagaaacagggcggaattgcatttatcattctctattttaccggcctggacgagatatattacctgccttttgaacagatagagggatactggaaacggatggaggagggagggcgcaaaagctttacctacgacgaggtggacaaaaactggcgggtccgttcccatgccggctttctggtccactatctggaagaaatacaaaaagacctggacagaaggtcataggaggctgcgcgtgaagcgccccaccttccatacctccccgcatgcctccctgcgggtacattttcattgaccagtcctgtaaataaaagtataataaggtatattgtactatgagcagaatagaatcccgaaactgcttcgggcacgcgaaaataggattgacagccgcatggttttcctctataatgaaacaatcacgttaatgaattagcactttaccacaggaaagcaaaaaaggatgaaagtgcggaaaaatataaaggcagggaacaggatggcaggaaataatcggttgattcatacgccggagggcgtaaaggacagttataacggagaatgcaggaagaagctggcagtacaggacaagattctggataccttttacctgtacggatatgagcatatccagactccgagttttgaatattttgatattttcagcaaggacaggggaagcgtgccggacagggagatgtttaagttctttgaccgggacaacaatacactggtgctgaggccggatatgacgccggcggttgcgcggtgcgtggccaagtactttatggacgaccacatgcctcttcggctctgctacctggagcgcacctttaagaataacagcagctatcagggccgccttaaggagcgggctgagacaggggctgagctgattggggatgattccgaggatgcggatgccgagatgattgccatggtcattgacagcctgaggcaggctggccttaaggagttccaggtggagctgggtcaggtggcattttacagaagccttctcaaggaggccgggctggaagaggaagtagagcaagagctgaatcagtacattgaaaacaagaactattttgccgtggagggtctgctgaagaaccagtccatggacgaagggcttaagacggcttttctgaaacttccggagctgttcggctccctggagcagatgcaggaggcgaaaaagcttaccgccaatccgggggccctggctgccattgagcggctggagaaggtccactccattctggagagcagaggcctggaagcctatgtatcctacgacctggggatgctcagcaggtatcagtactatacgggaatcattttcaaggcatatacctatggaaccggggattatattgtcaccggaggccggtatgacaagctgctggtgcagtttggaaaggatacgcctgcagtgggattcgtgattgtggtagaccagctgatggccgccctttccaggcagcagattgatgttccggtgacgctggtgaatacggtgatactctatgagacgtcagccagatcccgggccctgtggctgggcagctatttcagggataaggggctggccgtccagtccatgaagaagaaggagcaggtgccgctagaggattacaaggccatggcggcacagaggggcatgcgcaatgtcctgtacctgaagggtgacgggaccacagtgacagccatggacacggtgaacgggaatatagaccagatacccattaccgcttacgagtaaacacagggaggccgtgaaaacgatgagatatttgaccatagcgttagccaaaggaaggcttgcggacaaagccatggagatgtttgaggcaatcggcatttcctgtgatgagatgaaggataaggcttccaggaagcttatctttgttaatgaggacctgggagtgcgtttttttcttgcaaaggccaatgatgtgcctacatacgtggagtacggggcggctgacattggcattgtgggaagggataccatattggaggagggccgcaagctctatgaagtcatggaccttggggtgggaaaatgcaggatgtgcgtctgcggacctgaatcagccagggaaaggctggagcaccacgagctgattcgggtggccaccaagtatcccaacatagcaaaggactatttctataaccagaagtatcagaccgtggaaatcattaagctgaacggttccatcgagctggcccccatcgtgggactgtccgaggtaatcgttgatatcgtggagacaggttccaccctgcgggagaacggactcatggtgttagaggaagtgtgcagcctgtccgccaggatggtggtgaaccaggtgagcatgaagacggaaaatgaacgcatcacggccatcatcaagaagtttcaggcatatcttaaggagaaggccggaaagtaggagcacaggagcaaagtcaggaaagcggaggaatgttaggcatgagaatcgtgacattagacaataagtccatggaaaatattctggcggacatgttgaaaagggaccccaataattatgacagctatacccagaccgtacaggccattgtggatgatgtaaagaccaggggagacgaggcgctgtttgagtatacaaagcggtttgacggggcgtccctggatggggacagcatacgcgtgacccgggaggaaattgatgaggccatgaaacaggtggaaccgggccttttaaaggtcatggagaagtccatggacaatatccgccgttatcatgagaagcagagacagaacagttggtttgacgcccagcctgacggcaccatcttgggccagaaggtgactgccttagagagtgtgggagtgtatgtgcccggcggcaaggcggcgtatccttcctctgtcctgatgaatattattccggccgaggtggcgggagtgaagcgcattgccatggtgacgccgcccggaaaggacggaaaggtaaatccggtgactctgacagcggcccacatggcaggagccacagaggtctataaggcaggcggggcacaggcagtggcggccctggctttcggcacggcatccatccccagggtaaataaaatcgtgggacccggcaacatctttgtggctctggccaaaaaggctgtctatggccacgtgagcattgacagtatagcaggccccagcgaaatcctggtgattgccgatgacagcgccaatccgcgttttgtggccgcagacctgttaagccaggcagaacacgatgagctggcgtcctccattctggtgaccaccagcatggagctggccaggaaggtatccgttgaggtggatggcttcctgaaggtgctgtcacgcagagacatcataagaaagtccctggataattacggttatatcctggtggcggaatccatggaaaaggcagtggagacagccaacagcattgcgccggagcacatggaaatcgtcaccaggaatccttttgaggtcatgaccaagattcagaacgcaggcgctatctttataggggagtacagctcagagcctttgggagattattttgccggccccaaccacatcctgcccaccaatgggacggctaagttcttttcaccccttggcgtggatgatttcattaagaaatccagcattatttattattccagagaggctcttgagacagcccataaggacatagaggcatttgccgagtcagaacacctgacagcccacgctaattcagtcagagtgcgctttgaacaatagggaggtataacgaatatggaacggactgcatccatcacccgagacaccagcgaaacgcatatatccatgacccttaacctggatggatccggcagagggaacatcagcacaggtatcggattctttgaccatatgttaaacagcttcgcgcgccatggcttttttgacctggaccttacggtgaagggagatttggaggtggatacccaccacaccatagaggatacgggaatcgtgctgggacaggccatccgaaaggcagtgggagacaaaaaggggattatgcgttacggctcccaaatactgcccatggacgaatccctggtgctctgcgccctggacctttgcggaaggccctatctggtctgcgacctggtcttggaccgggaaaaggtaggggatttggagactgagatggtgcgggaattcttttatgccgtctcctatggggcggagatgaaccttcatttaaaacagctttcagggacaaacaatcaccatatcatcgaggctgcctttaaggctttcgccaaggccctggacggcgcggtggcggcggaaccgcgtctgtcaggcgtactttccaccaaggggagcctttaggatgggagagatgcccgccctgtcccggaagatgacaatgctccgttacacggacatacggctgtacggcgcggtcctgtgcctggttctgggactggctgcggcattgtccggccttttactggagagggtggccgcacaaaattatgaggaggagctggcctccccggttctttttgatatatcagaaccggagaggtacagctatgtcagactccagtatctgacagacagcttcgtggagcatgtaaaaagcaaaaaccagtactattttggctttgattttatgttccgtccttatatcatttccatgaagggggaactgcctgaaaatctgaaggatctgatggagtatacatacagcgatggtcttgagaagccgccggctcctgtggacgtctgtggttttggggagcccatccagtcagagcttatgggatatgcaagggagtcatacagcctgatgtgggaggagactcagatacccatgaccatggaggaaatgtcagatatagtcggaaactattatctggatgcggtgcccaggacatttttggagcagtataccctgggactgctgttttacgtggtgccggcagtccttctggctggtgccgcagtctgcggaatttcttacggcaggcggctgaaggcccagaacagacggctggcaggacgtcatggggaactggcgcaggcggacagggaactggcggctgccggcgaatatgcaaagggcatgaaggtttatctcacggatcatttcgtcatgtccgcctcctatcagtttgaggcagtgccgtatacccgtctgaggcaggcagaatacagctcaggcatggttatcggggtgactgaggatggattcgcccatatcctggcagcgggaccaaggagcagaccctatggagccatgctggccggcgagattaaccggcggatggaaatgtgcggatgtcccggagaaccggcgtctgagtacagagagaaaataatagaataaaaggagattcatatgcagctatatccggcaattgatatgaagaacggacagtgtgtccggttgaggcagggagcgtttaaggatatcaccatatactcggacgccccggaaaaggtggctgcccactggcaggaaaaaggggcgtccttcctgcatctggtggacttagacggtgccctggcagggtattctgtcaatgaggaggtcatacgcaggattgcggacacggtttccataccgattgagattggcggcggcatccgttccggagaggcggtggagcgtatgctggggctgggggtcaggcgtgtcatcatcggaaccaaggcagtggaacatccggaattcctcagggatatggtaagaacgttcggcgaggaggccattgtggcaggcgtggacgcgaaggacggcatggtggcagtggagggatgggagaaagtcagctcccttaccgcccgggacctgtgtcttaccatgaaggaatatggtgtcaggcacattgtctataccgacatatccagggacggaatgctgtccggccctaatgtggaggccacaaggaagcttacagaggagacaggacttgacatcatagcctccggcggggtatcctgtatggaggatttaaaatgcctgcatgaggcgggtatcaggggagctgtcatcggtaaggccctttatgagaacaggattgaccttgccgaggctgtgaggctttatgaggcttaagtaccagagaaaatggagagattcaaatgactgattgcaagaagctgattatgggatttggttacaggaacggaaaggcattttcctggaacggaaagcttgagtatgagggcaggcttaaggaccttgccaggacagcctgtgacaacggggcggatgaaatatttatctgcgaccgttctttttcagatgaggaccacgaggctgtcataggcgctatcaaggaaacagcccgcaccgtggatgagcccatactggcgggaggacggatcaggcgcctggaggatgtgaaaaagtacctgtatgcaggagccagcgccgtattcttggatgtgagctatgaagacaatgtggatatgatgaaggaggcggcagaccggtttggcagtgaaaagatatatgcctacatgccggacctgtcctatctgaaccgtgtggaggagtatattcagctgggggcgtccatgatgatatgcagggcatccggtcctgtcccgaccctggctgagctgggggagatcggtgagatatcctgcacaagccttatattctgcggaggtcatgaaagcgtccaggaaatggccggggatttaaagctgagcctggggtgtccccaggtggaaggcgctgtcctgactctggcggaggatgacctggacaaggtgatggagctgaagcagattttaaaaggcgcgggtattgtcacggatacctttgagagctctttggaatggaagaatttcaagctgggaggtgacggtcttatccctgtcattgtccaggattataagacgatggaggtgctgatgatggcctacatgaatgaggaatcattccaggccacactggcgtccggcaggatgacctatttcagcaggagcaggcagaagctgtggcttaagggtgagaccagcggtcacttccagtatgtaaaatccctgaagattgactgtgacaatgacaccatattggcggcggtgaagcaggtgggagctgcctgccatacaggaaacaggtcctgtttctttaccacgctggcggagaaggaatacaaggaaacaaatcccctgaaggtatttgaggaggtgtttggggtcatactggaccgtaaggagcatccaaaggaaggctcttacaccaactatctgtttgacaagggaattgacaagatactcaagaagctgggagaggaggccactgaaatcgtcatagcggccaagaatcccaacccggaggaaatcaaatatgagatttcggattttctctaccacatgatggtgctcatggcggaccgcggcattacatgggaggaaatcacggaggagctggcaaaccggtagcgtcggggaacaagggaagttccagacacgctctggtaatataaggccggcaatataattcataataaaaaatgcaggaggaaatagagaggtggcagaaatatcggaggttacagcgagattgctggattacgtttcatacgatactcagtcagaggatgacagggagtccgttcccagtacaaagaagcagtttgaactggcgcataagctggtcggggagcttaaggagctgggggcatcccaggtgaggatgagtgaacaggggtatgtatatgcatgtattccgtccaatctggaggagggaaagacatctccggccctgggctttatcgcccatatggacacggctccctccttttccggaaaggatgtaaagccgcagttcatccgggactacgacggacaggacatctgcctgaacagggaacaggacatatggatgaggacagcggattttcctgttttaaaggaatatgagggcaagaccctgattaccacggatgggaccactctgctgggagcggatgataaggcaggtatcgctgaaatcatgaccatggcagcttattttctcaggcatccggaagtaaagcacgggacgatctgtatcggcttcacgccggacgaggaggtgggccggggagccgacggctttgatgtggaaggctttggggctgatgtggcttacactgtggacggcggagcgctgggagagctggagtacgaaaactttaatgctgcgtccggcagggtgacggtccatggtgccaatatccatccgggcacggccaaggggcgtatgagaaatgcccttctcatggcaatggaattccagtcgctgcttccggcagatgagaatcctatgtatacggaagggtatgagggcttttaccatctggacaggatgaccggctgtgtggaggagaccaggatggattatatcatcagggaccatgacagggtgaagtttgagcacaagaaggaactgtttgcccaggcagccggattcctgaaccggaaatatggttccggaaccgtggaggctgtggtaaaggactcctattataacatgaaagagaagattgagccccacatggacctgattgataaggccagggcatccatggagaagctgggtatccggccaatcgtggtaccgatccggggaggcacggacggcgccagactgtcatatatggggctgccctgtccgaacctgtgtacaggaggacataatttccatggaaagtatgaattcattccggtacagtccatggagaagataacagaactccttatagagatttccaggtcttttgcggaaacaattaccgaagacgcagcaggtccctgtctttcggatgcaccagcactttaatctgtgtgatgccggcggacctataggaatgaagctgccgtgcctttagatcctttaaaaacaggtctttgtttctcataaaaagttcaaagtcatcaaatatatgattcaggcagacggtttatccggataatatccggacccatgaacatcatgagggtctggcaggagcttttgccggtcctggctgggggcggcgtgaaacagctgcttatggctgcgtgccaggccgcccttggattccacatcctgctttagcagggccacatagccgtccacggttcctgccggctcatacccatgttcctggcagtcggccaaaatctgttccaggtccttttcataaccctttctcaggtccaccaccatatagtcagccggatgactgcttgtgagcaggtagacttcatcccgcatggaaagctggggaaggaagaaggtggaggactttacagaggcatcctggggaatctgatccagaatgctcctggcctgggcggcctcctcgtgatggcgctgaaacaggctggcataatttgacttgctgtacatcacgcctcctatgaggacgaggccgcatagcaggccgcaggcgcaggcggagcccggaagccggccgtcatatcctgtacggtttttgcgcctgtggccgaaggtatgcttcatatcccggaaattcaccaatgccagataaatgagcagggctccggaaccgtaggtatactgaaagtagatggagtgctggtatttataattggacatcaggttgatgagtacaaaggggatgagcagggtccatttctgccagtcttttgtcatgagtggaaggaaacccagcggaaggagcatttcaaggaaaaacaggattttgtccttcaccgcaatctgggacagcacataggccggattgaccaggatggtcttaaacatgctgactaagccaaggcgcttgtccgatatgaaattgtcaaacctgttaatcatggctccctccccaaaacggttgatataccagatagcaatacagaaatatgcgcatgacgccagaaagacaacggctcccaggcggtactgttttttccacaggaacaggtaaagtccgatacaggccgcatagacaggcgcgtcctccttcaccataaggagaagggcggcagaggccagcatggatttaaaatgacctgtttccagaaagtacatgcaccagagaatgatgacggccaggaatttgttttcgtggaaatcataaaaacatccgcccataaaagccggataaaggcagtacataagaccgaaacacaaggtttgcgggcgggtgaatccaaatgccctggtcaaaagacataagggaaccattccgcttatgacaacgagggactggagcaccaacagggtttccggccgggggactaatttgtaaaagggcagcagtacgtaaaagacaggtgagagatggaccgcaaaatgggataaaagcccgtcgcgctcacaggtggtcagaggagacaggcatttatccatatagtaatacatctgtgaaaaaattccgaaatcataagccggcgcgtaattcagccggtaccgcagcactgtcatgacggcggtgaacgaaaaccagacagccgccgcgatggtgaggattatcagcagtctttttccggtcagccattgttccatggtttttatcatagtatgaacgtttcctttatcatcagggtggcaatatacatgagcacgctgggaatcagggaaaaatgaatccgggagcgggcagagggaagtacatagggaataaccatgcagagaaagattccaagccagatgcccaagaagctttccagtgaaatctgtctcacaaagtccagtgtcacaaagggaacatgactggccaaaaggaacatggtatttgtcagcagccagctggcaatggtcagttttccaaggccgcagcagaatggagacagccggaaatcgtgtttcatcgtttgaatcatagggttctcctcctttaaactgtatagtaagcatacgattggaaaatgtaaagatgctggaagcaactgtaagaaaaattagaaaaaccttaataaaatccgccgtctccgggaggtaagatatatgtgggaaaaagaaaacaaggtgaggcaatatatactccctattggatatacagtggtgatgaccctgtgtgtaccttttcatatgatgctgttggagtgcgctttattggcaggcagcggtaacgcggaaagcagctcctggctggtcatggtaccgggcgcattttacggtgtgcaggtaattcgcctcagctatggagagaaaaaaatggggatgggggcgccggggcagggctgatttggatcattgcaggcgcggtaaactgactggcatgtcgttatttttgcgggtttctgaccggaaggagagaaaatgagaaaaaggaccagtatcatccaagacaaaagaagcacaagcagatgcatgcagcgcgcttgccgcatgcgcggcccctgcgggcagcggatgccaggctgttgcaggaggaccagacccatttgtgacccgccgggaagagcatatagagaggatggtacgctctatgaaatggggctcaggtccaccagcaccaattccggaggattataaatacggggaagcctgttgatgcacagtccccggctgacaatcagggaggtggttcccagggcatactgtccccctgcgtaccggggaaagaagccctggtgaggcgccagaagcccgccagagcagccgggcatacggacctgccctccatgggcatggccggccacaatcagatcaaatccgctgtccctgtaatatttggtgagctccggccgatgtgacagcaggatggagtagacggcgggggaggtgcgggaacagcagcgccagaactgttccttccatctggaatccagtttaatggagtggtgggagtctgtaaaggcatgggggtcatccaccccgcctatgatcaggggctgccccttgattgttgtacggatggtctggcccccaaggacagtaaccccatatccggtgaacattttcttgatgtcgggtatctggtgaatccaatgctcatggtttcccgtaacataataacaggggtattgtcccttcaggccctctaaaagcagtaaagtccccttatgtgggactttgtggtcggcaatatcgcctgccatgagaaccaggtcggccctgtgactttgcagggccttaagaatcggctcctgtgcgctgccgtatatggtgctgtgcaggtctgtaatcagcgctgcccgcaggcgttttgtaagcttttttgagtattccgtataacggtgtactgtaagaccgcagtaaaatgggtttacagcatgtgtttttttctgcatatcaggctcctgtttactcattatcggacatctcatagggcagcagctctgccagatagtgtttttttctcagggcttcctctatctcatccagtatctcctcctgctcggcgcagacatggtggaagtggtagccggaggtgacattcatgagaggggtggattttccggtctgtatattgttcatgaacaactgcacgtcgcggcggttcttgatatttaagggggctgacattttcccgtatacccggtgattgaccatgacatccgccacggttccgcccaggtccacgatggtgaccagttcatcctcggtctgctcattggtgtggcagaccttgaagagacgggatgcgtgtttggattcattgaggacatacccgcgggcggtggagagaatgggatagcccatggtgcgcaggagagcaatatcctggaccaccacctggcggctgacgccggttgccctgccaagggctcctccggataaaggggcggaagcctgcctcatcatatccagaagctttctgcgtctctgcgttccgttcattgcacattccatttctcattccctcctgcaaaacatagttacggtttaatccgtcaacaccttcaggtgcttcaggctgatatccagaatcggggcagagtgggtcagtgcgccgctggatacataatccacacccagctctgcaatggtccggatgttttcttttgtcatgttgccggaacactcggtctcggcccggccgtcaatatagcgtatggcttcagccatctgctccggcgtcatgttgtccagcatgatgatgtcggcgccggcgtccactgcctccttcaccatatccaggttctctgtctcaacttcaatcctgcggacaaagggagcgtatgcctttgcagcggtcaccgcctccctgacgcctccggctgcatcgatgtggttatcctttaagagcacgccgtcggacaggttatagcggtgattctgcccgcctccaatccgcaccgcatatttttcaaaaatacgcatgcagggagtggttttccgggtgtccagaagtcttgtcccggtaccctcaagcatccccgcaacggtatgtgtataagtggcaatgccgcttaaccgctgcagataattcagggccgtccgttcgccggacaggaggacgcgcacatcccctgtgaccgcagccagatgctggcctttctttacttcctccccgtccctgacatcaaagacaaccctggtttccgggtccagaagggtaaatacgcgctcaaaaatctgtaatccggcaatgatgccgtcctccctgcagataagctgtacctcgccttttttgtattcgggcatgactgagttggtggacacgtcctcactgctgatgtcctcctccagggcaagacgtatgtatttgtcagcaacaagctgcatggtaattggattcataattaattctccctttctggctgttctctattctttttgcggctttcccggcaaacaccaggctctccagcaggctgttgctggccaggcggttctttccgtgaaccccgttgcagctggtttcacccactgcgtacagatgctccatggtggttctggaatccaggtccacccacacgccgcccataaaataatgctgggcaggcaccaccgggatgggctcccttgtgatgtcataaccttcctcaaggcaggtttcatatatatgtggaaaatgttcccgtatggtttcacggggcatgggcgcaaaggacagccaaacatgcctgcttccctctttttccatctcagcttcaatggcctgggataccgcgtccctgggcagcagctcattgacaaagcgttctcctttgccgttaaggagcacagctccttcgccccgggctgattccgagatgagaaaggacctgccgggcttttccgtgtaaaggctggtgggatgtatctggacgtaatccaggtgctccagttttacgccatgcttgcgggcaacggtcagcgcgtcacctgtaagacagggaaaattagtggaatgctggtagagtcctccgatgcccccggtggccatgaccgtgtcccgggcgtgtatggagagggtactgccgtcccctgtcctggccaggatgccggcgcaggctccgtttgcggtcagaatatccgtcataacagtgtattccatgatattcacattggggagcgcggctgtttgttcctggagaaccgtggtgatggctttaccggtgatgtcctcatgaaaacagattctgggcctggaatgggcgccttccttcgtatattttaaactaccatccgggttcttgtcaaaccctactcctagctccagaagatgccggatgatgccggggctggtgcgtatcatcaaatccacgctctccttccggttttcataatgaccggccctcatggtgtcctcaaagtatgactcatagtcgtcctcgccccggagcacgcagatgcccccctgggccagcatggaatcacaggtgtccatatcctccttgcatatcatcagaacatgcaggtcctttggcagattcagggcagtgtaaagccctgccgccccgcaccccgcgatcaccacatcacagtatatatgttttgtcatttcctaatgcctccttatgaaatcgactgtctgaaatcgaccgcctgaaatctgctttcaggcggctaccgggccagattaagcatttgctccagagccctgccggccgacgggacataggctttgggtacggatgcctgattctgtcctgtgcgcaggacatggatgattttgtccagtgttatctttttcatatcccggcaaattggttctgtatcaggaaaataaaagtgtttgcccggattctgccgttccagttcatggcgcacgccgttttccgtgcagatgatgaattcccgggaagtgctgccggcggcgaatttgagaattccggtggtggaaccgatataatcagccagctcaagtacctgggcattgcattccgggtgagccagtacctgggcgtttggatggatttcctttaaggcggatacctccttgggagacatctggtcgtggacagggcagcagccgtttaccggcatcacatgcttttcaggcacctggctggccacgtaccgtcccaggttcttatccggtatgaaaaggatgtcccggtttggcaggtttcttacaatctggaccgcattggcagatgtgacgcacacatcggaccaggacttgatttcggcagtggaattgatgtaacagaccactgcaaggtcaggatattcccttctgtattgttccacttcctcctttgttaccatgtgggccatgggacagtctgcctgtgcgtcgggcatcaggaccaccttgtccggactcaggagctttccgctttctcccatgaaggagacaccgcagaacaccatggttctgcggtcaaggccggccgcaatcttgctcaaatagaaagaatctcctatgtaatccgccacttcctgtacctggggatccacatagtaatgggccaggatgaccgcgtcctgctttgcttttaactgctctatttcttcctgctttgtcataatttcccctgttctgccggcagagtgacaccggcttttcatttggctttctgtttatgtctgcaacagtatagcacatatatttacatatgacaagacacattgggcgttaaatttatcccggaataaagcggtccgagtaattgtaaggattattaaagaaaagttcagcactgaaaaaagatgatatggtaaaattaggataggaattatgccggacgttttctgacgcggcgcagcgttctaaacgaggaggattaatatgaaaaaaatccacggaatatcagcttacagaaaaaaactctgcataatacgaattcacaggataacagtcctgggacttgcggcatgtcttttgttcatggctgtaggtctggcggcctgccaatcagcggccagcgggaccggggaacagaaggagagcagcgcggatgtccggggacagggcggcacaggacagaaggacagggagaatggtgccccggaaggagagaacgtccaggaagcagaggcgtctcaaaggcagagggacgcgccgggaacaccggctatgggagatggacaggaggcggctaaggcggagaagggggcagacggtccggggacagtggaccggtggcagatggttcccgaatacggcatatgtaaaaagggggaaccggccctgtatgtattggacatggacgcaagccagatgaaaacagatgcggatggagtcagcgccaggcttctttcggcggtgtatcaggataacgtgatcagcgtcagagtgaagctgagggatgataccgtgaccctgataccggatgagaaggtaaaggagattttgaaacaggaggaggaaaaacagaaaaaacaggaacaggggatttacacaatttgggatgacagctatttctgtattgacagtgataaaaacatttacggccacagtgcgtttcgggacagaatgcgggcggaaaagaaagcgcagaaggaggaaggcgcaaggacggtcacctttgaccgtattaacggcaagggaatgaccggactgggctttgcccagcagcaaaacagcatctcttacaaagataatggaaagggcggctactacatatccgaagtgtcggagaaaaccataggaaagggccggtttacattggaagagccggagggtgtctatgaactctggctggacggttttaaagaacctatgaaaatcgtttttaagaaggcgcctgcctatgattcgctggaggatataaagggaatggtggaccacgaaggattttacgggatggcagaggggagagtggaggaggacggtctcaggcttaccacctatacctactcacaggatggatacaggatcggattcagccgcggaaaactgatggctacgctgtcagatggaaggaccaccgaactggtgcctgtgctgggggaacagctgactacatcattggaccagctgtccggcattcggcccagaagcattcaggagacactgtacaggataccagagggagctgtggttacggaagcgtccctgcatgcggagaaacccatcgtcatatcgccggagcagggaacagtgctggagatacctgtttccggggagcggcagcctctggatatggtggtggaattcagggactgcaggatatatctgaacggagtcagtcccatggatgaactttatcaatatggcacggatgaaaacggaaaccctcttaccaagcatatggcatacatcgatgccagggcagagatgagggacgcggataagaacctgtactacgtaaatgcggtgcagccggagaaaggccgggagggcagttccaaagaccccttaaaaaccgtatacgcaatggcggatatggcaggggcagacaaatataatgcgggtgagctggccggattcaaggcagtataccaggagggggaatctgtaatccggctgcagcttcaaagaccctcctatggatggaaccaggaatttgtactgccggtacagatgtgaccggctgaccggactgagaatgcgtctgctgctttgccggactgttccagtgtgtaaaaacaggggaagggcggaagatagacaggaccctggacctgaacatcctgggagccggagcaacccagggagactatccgggttttcttcttttttcttaattatccggctgcgctattgtttttgcctgccgcatgtgcaataatttactgatggattcagcgcaggtatgtctggaccggtatcatcatggatatttgaaaggaatttaaaatgagaagcagaagaaaacgaagaagatcaagggcggttattatcattcccctggttttggtgtgtattggggccgctgctgcgggcatggcatttttatggtttgcaaaggggcaggccggtgtacggcgggccacgccggatgaacggttcatggagtatataggatacctgactgagggaaattacgaggccatgtaccggatgctggattccggaagccgtatggacatcagccaggaggattttatcaccagaaataagaatatatacgagggcatcggcgcttcctccatccgggtggatattaccggagtggaggagaaggaggaccaggggattcagacggtcagctatgagaccagcatggagagctccgcaggccccatccattttttgaaccgggtggattttaagctggaggcatcctctgaggcagccgggacagaaggctatgagagtgaagaggccggaaagaaaaagaatggaaagaaagacgaagaatacaggctgatctggaacgaccgcgtcatatttcccaacctgagctggaacgacaaggtaagggtcaccacggataaggccgtaaggggaagcgtcctggaccgaaacggtattatgctggccggaaagggcagcgcatccatggtggggcttgtgccgggaaagatgagccgggaggcggataaatattcagaggacgacttaaaccggctttcagagcttttaggcgtttctgctgacagcatccgcaaaaagctgtcggccggctgggttaaggatgattcccttgttcccattaagacgctaaagaaggtggatgagctcaatctccagtcccaacttccggaggatgagaatgtacagaacagggcgcttcaggacgaacttctgaccattccgggcgtcatgatcacagatacgcctgtcaggtattatcccctgggcgagaaagcggcccatctggtgggctatgtacagaatgtgacggcagaggatcttgaggagcacaagggggaaggatatctgtcagacagcgtcataggcaggagcggcatggaaggtctgtttgagaaggagttaaagggacagaatggccgcattatatccattgtcacgtcccagggagaagaaaagcaggttttggcagccattcccagaattgacggccaggatattaccctcaccatagacagcagcctgcaggagatggtgtatgatgcatttgaggacagcaaaagctgtacagtggccatgaatccctacacaggagaggttctggctctggtgaacacccccagctatgatgacaatgacttcatcctgggcatgtcggaggaaacctgggccgggctgaatgaggatgagagaaagcccatgctaaaccgtttcaggcagcgctttgcccccggctcctcctttaagcccatcacaggcgtcatcggccttaccacaggcgcccttacgccggatgagaatttcggggaggacgcggcaggactaagctggcagaaggatgcgggctggggcggatattacgttaccacccttcacggctacagcccggtcaaccttaaaaatgcctatatttactcggataacatatactttgcaagggcagccctgaaaatcggcaaagacgattttatggcagggctggaccggctgggatttaaccagaagcttccctttgaaatctcggtggcggaatcccagtactccaatacggaccagattgaaacggaaatccagctggcggacagcggatacggtcagggccaggtgctggtaaatcccgtccatctggcatccctttataccatgtaccccaaccgtggaaaggtcctgaagccctatcttgtatacaaggatacaccggagccggaggtctggattgaggatgcctgcacaccggaaacagcagagatcgtggaggacggaatgaaggctgtaatcagttcggaacacggcacaggacacgctgccatgcgttcagacatcaccctggccggaaagacaggaacagctgagataaaagcatccaaggaagatacaagcggcacggaactgggatggtttgccgtgtacacggctgatgcggatatgcagaagccggttcttatggtcagtatggtggaggatgtgaaaaacgccggaggaagcggtctggtggtcagaaagtccagggatgtgctgggagcctatataccgtcaggacagtaggacaatccggagatataaacatatactattagtgaggaggtaataaacggaaactgtgtatggggggattggaggggaaatcaatgcctatggattcattttcatcagaggggattttacggaggctcatcaggcttccctatctcccgctgtatgtcggtgtactgaatgcggcggtggaactggatgtcttttcgggccttacccagcgtaagagcgtcagggatctttcagaggagagagggtggaatgaagataacacgcggtatttcctggacgccctttactgtctgggatttatctggaaaagggatgggatgtactgtaactgcagggaaacggaccgctaccttgtaaaaggcaggccggaatacatcggcggccatctggccttcaactgcgcagaggaatgcatgggatgcagggatattaagaggctggttgaagacggccccggcgggggccatggactgggagggcagctgacctttgagcagtacgtacagaacatgcgggagtcccaaatgggcttccgccagactgagatacagagaatggtaagagaacttccggaatatccggtaatcaggaaaattctggatttaggctgcgcaacggggctgctgggcctgggagtgattggggaacggaaggatatatccgggattctctatgaccgccctgctatggaaccggcaatccgggagtccatccgtctcaccggcctggaagggcgggcggttcctatgacaggggattacctggcggatgatataggggagggctatgacctgattatggccatagccaccttaagcttcgtggaacaggagctggccagccttatgaagaagctttataaggccatgaatccgggcggcgtgctgctttgctattcagagggaatcgaacgggatggctcgggcccgtgggacatgatgctgggctggcttccgtacaacatgcagggctatgaccttggattgaaaaagaatgaaatagcagaggctgccatggcagccggcttcaggagcgctgagaaacggaccgggatctattccacgggcaatgtggatgtggatatattcagaaaataacttggtaaaaagccgtagcccggacagcgaagcagggaggtctcgcttggcaatgggtttatgatatggtaaaataaaaaagctgtgtatcatttgaaaagagggaaaaactataaaggagaaacaaacaaatgaaaccgaatgaaactacaggaaaacaggaaatcatgtaccgtcttaagaacgcaggggagctttacgttctgctttccatgtgtacgggagagccctatgtggtctgcgaccaggaaacctatgatgacgaaatcattgttttctttgacggtcaggcagccataaaggagtcaaaagaacagaccgaggcaggaatacctgtcaggcccatgaagctggagaacaggcagttcctgatgttctacaccagcctttatactcttggggtcaatgcgctgctggtaaaagacggcgggagagactgcctgattcagctgcaggactttgtgaagcgcaataatcagcagggacaggagtcgggggagaagatatgggtggagaatccgtcccttcatctgaccatgctgtattacatgcaggaactgagaaggaaaccggggcaggagaacctgccgcagattaaggaatggcaggatgagatttccaatgatttcggcaagggcagtttcattgttcctgtggagaaggagggtaaggggctggcagctgtaaaggtgaacgaacagttattccaggccatctttacagacatattagagttccagaggtttaaccgggagggaaagctgcgcccccttgtggtgacggctgacaagataccacaaatcatgacagaagaggcaaagggcgtgatcctcaatcccatgggagtcaggatgcctctgcagattaagagaacggccggccagacgaaacagaatgcttaaaatgtgagaaaaaggctgcgatgaggcaaaactcaccgcagcttggctacgttttaagctcaagggaaagttggccgaaatcatcgggtttgtctttttgtttgtcaagtgacgtcactttttttgatatttcgttttgggttttgttgtattcttccttggcccgtttaaggatggctgcctggccttcgcggtatgtattctggaaccagtaaatgagcagggattcgtctgaagtcagaagcttggtgacagatgctcctgcttcatccgggcgaagcgcagcagcaaggggcgtttccaacggaatgtcgaaaatggaatggacggaagtgccaagtgcctttgaaatggactccatgtgcaccatcttatccttctggttttccccgtttataattcttttcaaggtgctggcaggtatgtgtgtctcctttgataaggttgcctgggtcataccctttaaattcataagtgcaatcagtttctcgtttctcacagtaagtccccatttcctggtaatcccatattttatctatatcaaactccgatatgaaccatcaaattcctttcatggataattctaccatataaactaagattcttcaagaaacggcattgatttgaggatattttttctcgtgatattttttctcatatttcttttgagagattttgtgcggcactattttttctcacgtcatttcgcgcggttgtgacggctgatatctttttgatagtggtatctgttcctatacgtttattgagttattgtgacatattctttcaatttctttaaatccatggacagcactacttaatttgtttacaataaacaggctggtcaaaggctggctgcatttaaaatacacaggagaccagaatttatgtcaaaggataccaaaatgaagaaacgaatcagtaagaccagacaggcaaagatgcgggagaaggaattaaagtctaccctgaagtttggtgtgaagctggttttgattctggcagttgtgattgggtgtgcacagctgtttttttatggaaagaatgtggtggcgggcaggagcaatggtcccgctgtccggatagcagcaaaaaacagcgaagcaagggataatcagtcggattcaatcaaaacaggagaacagggaaatgtcttggggccgtctctgtctgattctgaaaaaggccggcagcagacaccggagaccattgcgccttttgcagaatccagtgatgggccgggaaacgtggtgcaggccgccccgccctccggtgatgcgtccttagacccggcaggcggcaaaaatgagctgttccctgtttccgggcctgctgacgcctctaagcccatgatagcatttacctttgacgacggcccttattacagcgtggatataagaatcctggacacacttcaggcttacgggggcagggctaccttttttatagtaggaagccgcgtcgatgactacaaggatacccttaagagaatccgggattccgggtccgagataggaaaccatacattcaaccataagaatctggaaaagatttctccggaagaagtggcttctcagattgagatgaccaacgatgcggtggaggctgtaacaggttttcggccaaaactggtgcgtgtgccctatggcgcctttaagagccaggtgcctggtctggtatcctaccccatgattcagtggaatatcgatacccaggactggtccagtaaagacaaggatgccattgccgcatctgtgctctctcaggcaagggatggaagtattgtgctgatgcacgacctttatccagccacggccgaggcctttgagacggtcatccccctgctggctgcccagggataccagtttgttacggtcagcgagatgtatgcggccaaaggggtgccgttggaggcagggcaggtttattttagtatccctaattaacagggcaggcaaatatatttcagttatctggcaatctgcttcatacaaatccagtaattcctctcagcgattgtctttgacaactggatttttacagtacagtatgccctgcccatgagccagtccggcccgacgatgccgcgttcaaaacagcctgctgcctcggacaaaagcgagacgtccggtttcgcccgcctgaatcgctgcatggcagttcggacctgcctttcgtaggcagggtgtgaaaacgtatcattttcccaatggtaggacagctcacagaccgcggatgtctgggattctacgggaaaataggaggcctcctcggaggactccgcaatatatagatagtatagactggcaatctctttcccctcgtgccgccgcaggatacggcccaggcgctgaatccgctgccggttgaccgacgctgaggacatgacgattccgacgctggcggacggcacatcaaagccctcgtccagagcgcggcagctgatgagaatacgcacttcgccgtcacgaaaacgttccagagcaagctttcttgcactgggatccatagcggaatggcagcgcgcggcctggttgggatagagacggtccagcttctcatacaggatatcggcctgcttaatccgctcaccgaaaataataatctttgcgcttttatctaaaagtcctatgagctttatgacacactgaagacgggacatggcttcgctggtaagatttttgcgtttgcgggacgaatttaagtatgaccgggctaaatatgcgtagtcccctttttcattggcaatctggcagagcctgcggaaaaaggcggagcggttcagcccttttaagcttgggtaatgggagattagcttaaggaacattttcctcatattgccgctcagctcctcatactccgctttttcctgaggggtaaaagaaagcgcgatatgaaaggcggcgtaagggcaaagcgtctcatcttcttctgcctctttaagtccataccggaagatctccgggcccagggcgggaatgagaacggacgcgttttctggccggtttagcccgggcgtggcagacagccccagggatgcatactgctcagggcaatttttagtaaagggaaggaagtcaaatatctttcgattttcgtctccggtatagcggtggcattcatctgcgattaaaaaaaccgtgaatccctcttcaagatccctgacaatatggcgggcaagagaataacgggcggaattgattacgtaaatcataaacagacggtccggtgtgtctctttggccgctgtaatagaaaccaatgtcccggcgggatacggtcccgtcaaaaaaattccgtatggcagcaccccactgcgccagcaaagatgcagtgggaaccactattttaatcctgagatcagacacggctgtccgctctctaagcagctctccggcggctaaggccagatacgtctttcccgctcctgtaacaacattgacgattccatggcagtgctttttcttccattcttttaagcacttctcctgccagagatataactgatattccataaaaactctcattcctttcgcttcgcttaggcacaaaacagttatgaaatagcaagtttgtgcttccactattttatttttgatgttaaactctcctcagacagatacactacagagcacggaggaggaagtagaatcggttcctccatttgggatcaagtccgcataaaaacatgtgtcggctgtcttctcaagcacaaaccagtgacgccttgagctcgtaacctaatcattgtcaaagcaattccttaggtctttctttgctggacagccagtcaatgtctgtctattttacttaggagggctgttttatgttatctatcaaacactttgtctgctgtggcatggacgttcacaagaaatttgttgtcgctaccattgctctgacagactacaggggcgttacttcttatgttaaaaagcggttcgccaccttcaattccgatcttaattctttgaaaaaatggcttctttctttcaattgcactgagatctgcctcgaatccactggtaaatactggattccaatttttaatatcctggaggattcctgtcacgttgtcgttgctaaccccaagtatgtcagggctatcaaaggacagaaaaccgatgacaaagactccgcctggattgcggatctgtttaaatttgatattgttccttccagttatatcccctgtaaggaaattcgcatgcttcgggaattgttccgataccggcagaaactgattggccaccgcagcagtgagaaaaaccggttacagaatgctcttacggtttccaacattgcccttgcatccgtcctctcagatacctttggaaaatcagcgaccgccatcgttgactatatcctgacctgtgaggtatttgaccccgaatactgtaaatccctgcttcttaaaaaagcaaaggacaaggcagatgatgttgtaacctccataatcggttatgaactgcgccgtgaccaatccgttaagattaaggtctgcagaaagcatttcgatgaaatcaatgagtgcgtctccactctcgaagaaacgatttccgacctggctaaaccttaccataaatttatcgaattggctactacaattcctggaattacagagcagtctgccacctttatcattgctgaaatcggggtggatatggcggtattcaaatcctcaaaacgtttgtgctcctgggctgggctggctcctgaaaataacgaaagtgccggtaaaaagaagagcgtccatgtttcaagagccggggtgtacttaaagcctctgctggttcagtgtgcaaatgctgccatcaagagtaaaaacccttacttcagatacaaatatgaccgtataaaaaaacgtcgtggtcataaacgggcaatcattgccattgcacgcatggtgttgacttgcatttaccacatgttccaaaagcaggaggtatttaatcctgccgatacggattattccgctattcctgaagaaatgtaccggaaatttcaggaacagtatgacagaaatgccatcaaacgtttagagaaacgaggctatatgattactcctcctgctatggcctgataccctttattccataggatcctttggggcggcagtttactggtgctcttgttaagttacgattttttttgattttttctttcaacctaaatcctccatgaaatcaaagcagtaagcaggtatcagctctacttttaggacttgcccgccactgcttttttaacggaaaatactgcgccacagcctcgacaggccatcgcgcagcgattttgttcaattaaaattgccagtacagcaaaaatatgagctatctgtaattgtagaattgttttagttaagctataataattttgtgatagggaggcggtagaatgttctcgtatgaagaaattcaaaaatttaacgaaacagaaattttgatttataaatttatcatttctaatatcgaaaaaattccgtatatgacaattcgagaattagcaagtgatatacacatttcaacttcaacattattgcgtttttgtaataaaaatggttttgaaggatattccgaatttaagaaagctataaatgatgaaatacatctccttaaaacacaaccgcctttagaagatttgcaggagcttaatcttttcttccaaaggacaaattcaagtgcatttgagaggaaactttcgtcggctatagaaataataaaaaattctgattatctgatttttattggaaacggctcatcaggcactttggcaaaatacggggcgcggcttttttccaatatggggaagttttctgttggattggaagataccttttatccaattgaaacatattcttataaaaatgcagtgattattgcattatcagaaagcggggaaaccaaaggtgtagttgatatggttcggcaatttcagcaaaaaaaatgtatggttttatgtattaccaatgcaccaaacagcactttagcccaaatatctgattggagtttttcatataatataaaggaacaacgtgtgaatggagattataatgcaaccacacaggttccaaccctatttattttagaatgtcttgcgagaagaatataaagaaacagcctgttactttgtttgtaacaggttgttttgtaccattaaagcaggaggtgtaataataagcgaataataaatcactgatattattcaagaaactatacttaaaacaatttcacaggaggtttagaatgaaagtaaacgcagcatttatttttgtcgcaccagaagtagactacaagaaacatagaacagttataaatacgccaacagtcaacttgacagttgttggggttaaaaactattctgaagccgaaactgttgcgcgggaactatcagaacatggagtaaaagcaatagaactatgtgcagggtttggaaatgaaggtattgcgcgtattagtaaagctgtaaaaggaatggcaaacgttggtgcagtaaaatttgaccttcaccctggatttgattttaaaagtggagatgaattattttaataagcgcgtagcgataatgcctaccatcgtgcttctttcccgatttatggcaacagcttcagatggggcaacccatacgcttcttaatttttctgcaaacgtcatctggaacaatctggttttaatctatcctgcaacaatcgttctgattgctggatatatgattgatcgggaacggacggaccacactctgaaaaacattctgacaatccctatttcctttcggaagatgctgataggaaagttggttgtcatttcccggattttctctgggtggtatggtacagatgctttttcagatggctggtatcaatctgatttcttacatacatcgggacttaccttaatcggttatcaggatggaagcagtgcccccactggaaacgtcttgttaagtatagtgtccatcctgtttccgcatacatcgtatagttgaattatggatttacttaatatgtattgacgtatagtttataattcacattttctgccttgtcctgtcccaggggctgtcctataataagtgaaaggcattttttgagaaaatccatccgctgtaacatttcgcggacatttgcctgttatactatctgcaaaaagcaaaggaagtgacaagatgaagcagattttaattgtcgaggacgacagttttttgaataagatgttggcgtataatctgaccgcagatggctactttgtgaccgccgccttaaatgccagaaccgccgtcgaagccctccgccagcgggaatttgacatggtgctgctggacatcaacctgccggacgggaacgggtttgaattgtgtaatctggtaaagccccagcacccggacaccatagtcattttcttaaccgccaacgatcaggagagagaccagatacggggctatgaggtgggcgcggtggattatattacaaagccctttgtaatcggggccttgcagcgaaaaatcaaagccatgttcgccatgctggaacaccacaagcccgcaaaggacatttacgatgatgggcggctgtttctggacttctccgagcaggccgcttccctcaacggcaagcccctgttgcttaccccgatggaatataaaacactgaacctgttttgcaaacacccgaagcaggtcttgacccgcggacagcttttggaaaagctgtgggatatagacgagaaatttgtggacgagcataccctgacaacctccatcagccggattcgcggcaagattgaatccgatggcggcgcgccctacatcaagactgtttacggcatgggctatcaatggacgggaggcgaggcaaaatgaagcttaaaaccctctcggtaaggcggctgttccgatgggtggcaatcgggctgaccctctccatgaccgccatcactgtacttttatttcttgtgacaaagcatgtggcggcgctgtttgcaggcggggggctgcttctctgcgcccttatctggctctttgtgctgacacaggcatttgggaagcggctttccctctttacatctgatctgtgtcagacccttgaccacatgatcgccgggaatgaagcgccaaagcgcccggaggatagtgaaacccagcttgccagaatcggccaccggctgacccggctttatcagatcatgcaggagaaccgccgcagggtggacgaagaacggcaggagttacagacccttgtatcagatatatcccatcaggtgaaaacgccggtgagcaatttgaaaatggcaacggacaccctgcttgcaaagcccgtgaccgaagcggagcgcaccgactttatccggggaatccgcgcccagacggataagctggactttctctttcaggcgcttgtgaaaacctcccggctggaaacgggcgttatccagttggagaagaaaccgggccgcctctttgacaccgtggcacaggccatgagcggcattgtctacggggcggagaaaaaagaaatcaccgtgtcggtggactgcccggaagatttgaccctttcccatgacagcaaatggacagccgaagcattgtttaatctgttggacaatgcggtgaagtacaccccggcaggcggaaaaatctctgtgtccgtgattcaatgggaaatgtatgtggagatcaaagtagccgacaccggcaagggcatttccgaaagtaatcaggctgccatcttccggcgcctttaccgggaggaagaggtacacgaacaacagggcgtggggattggtctgtatctggcccgtgagattgtgacacggcagggcggctacatcaaagtggtttcggagccggggcgggggtcggtattttccattatgcttccccaagatagaaagcggcggatggccttataagctgcccgccgtaaatttttgaaaaagtttgtccgttgtaacatttcgcggacatttgggttttacaatgtccttatcaacaggcaggaagccttgaaaggagttttttgaatatgagcgttttacaaacgattgacctgaaaaagtattacggcacaaagacgaacatcacccgagcccttgacggcgtgaacttctccgtggatgagggcgagtttgtggccattgtcggaacttccggcagcggaaaatccaccctgcttcacatgatgggcgggctggacactcctaccagtggaagcgtgatcgtccggggtgaagaactggcaaagaaaaatgatgaagaacttacgattttccgacgccgcaacatcggttttatcttccagaactataaccttgttcccattctgaatgtgtatgagaatattgtcctgccagtggaactggacggggacatggcagatgagcactttttggaggagattgtttacctgctggggctggaagataaactcaaaaatatgccgaacaatctctccggcggccagcagcagcgtgtggcaatcgcccgcgccctgattactaaaccggctatcgtactggctgacgagcccaccggtaaccttgacagtaagaccagcgccgaggtattggggcttatcaagcgcaccagcgcggagttccaccaaaccgttgtgatgattacccacaataacgacattgcccgccttgcagaccggattatccgtattgaggacggcaagattgtggattaaggaggtggcacgctatgacatggccttttgagaatgatacaagcgctattacaaaaaagctggctaaaaacagtttgaagtccggaaaaatgagaaaccttttgattatcctaacgatctcgctttccatcgcattaatgtctggactggctctctatatagcctccatgcaaaccgcaaatagtcggcaactggaaaatttgcagcaagtatttttttacgacattacagaacagcaatgtgatacgcttcggctggacagccgcatttcggaaatgagggttacaaagtacggcaagcgttctgaaattgaaaactatgtaatctggccgatgtatattgagcaatccgagggaaaaattcaaagcgcagaaatttccgagggacaatacccatcggctgaaaacgagattgccgttgatgtgtcttacttagaacggattggagaaaaccttgagattggtgatacaatttcgttttctttttatgacggaacacaagaatcctttgtactttctggtcttacagataccggctctacttctgatgtgtacccggtttatttctctgaacaatatgcggaaaccggaggccaactgaaagatactttgtttgtagccgctgcacagatacaagaagcaaaaagtatgacggcaaatgaatttcttgataccattcatgcgattggagcggattgcggtattgaacgaccgagcattggtgaaaacagtgcttttgtccagtctttgacctttaatccgaaaaatatgcttattgccgtttgcattggccttgtagttctatttgccggcgtggtggtgatatacagtattttctatatctccatcattaaccgtattcagtattttggacagttaagaaccatcggaaccactggaaaacagattaaaagaatcgtaaaacgggagggtactttactattttgtataggcgcgccatcggggttagccatgggctcaatttttgcgtggattctcaattcagagggatggtcatggataaactttctcatttggggtgcattgattatcttagcagagtatatcgccgttttatattctattagtaagcctgctaaaattgcaagtaaggtatcacctattgaagcatataaaacaaaaggagttttgcaaaaattcaagacgcctaagcacctgttcaggaggattactcctctttcgatggcaaaaatgaacacttcccgcaacagaaaaaagttccttatgacttctttctctttggcaatcagtggaattatctttatggttggttctgcctttttgacttcctttaatcaggaggcttatgccagaaatggaattatggaacatggcgaagttaggatttatttatcagaaaacgctgcacaagtgaatgaacagggatatgcaggaatacaagtcaacaatccgctcaatgatacttttgtgcgggaaatttcccgggtgaacggagtaaaagaaatcataccttttgagaagctgtactgcacatttgaatataatggccgtcgtgacgatgattttattgttccctttacggaagaagaatttactcatttatcaaagtatattgaaacgcaagaccggagctatttggatattgtagaaaacaaggaaatctttgtcttaaagaatgacgctgtggaagagatatacggctggaaattccagcccggcgacactataaaatttgaatggtttgacggcacagaataccgcgaagatgtattctccattggcggtgaaattacaagtgaaaaagcatacagcaatccagaatgttttactgccctcggtgtatctggctggtttataatgcctgacgagctcgttcatacaatgctgccggaaagctgcaatatcaattcggaagtgcttctctcgacagaatgggattccaaagagtcggaaatcacgcaacagttgaaggcaattattgccaacgcagatgatttgcaaatgcgcaccttgagagattctatcaatagcaaggcaggaatgtataacacgctttttacttcaatcattggcattagcatttttatcatgatgttcagcctgatcagccttatcaatactctggtgacaaatattatgacccgcaagcgggaattgtcggttttacagtctattggcatgacaaagcggcagctcaataacatggttcagtatgaagccggattgattgctgtatggaatatcattatcactctgttagtaggtggatttttagggtttatgcttatttggggactgaacagtattggcatgaattatttgcactgggcgtatccgatatggtttgcactcttgtatgcggttgttgttcttgtgatgccagtgattattacaaaggcagcaatctattttctccaaaagaaatccattgtggagagattgcgcgaaattgaataaacgattggaaatgtccaaacaaggtggcacgctatgacatggccttttgagcatgatagggatatagcgtaagcagcactgattttatattttttaataaatccggtaaaggcgctaaatatgtgtcattcagcgcctttctatacttaaagtttattttctcagtacacccttcaaatacttcgcaatttccttcacctggcagtttttgaagaaatattcctgaaatttctcgccgctgattgcggcttttaaaacttcctggtcaatggtctttaaaattgtcataatatctttgtgggtaatttcctttatattgtctaaaatcttcttgtttctctgttaaatattattttaccagaaggttgggtagccatataacgatatccgggatataggtacacattagtaatacaatgattaacggtgccaggaacggtataatggatctatacagcttatcaagcttgatcttagctacgtcggatatgacgaacagacatacaccaaagggcggggttacctggccaatcatcagattcagtaccatgacaactccaaagtgtaccagatcaatattcagatccttgacaataggcagcagtaccggaagcatcagggttaggattgcccctggttccatgaacatacccagtatcagaagtaccacattaatgataagcagaatcacttcaggattgctgctgattcccagaataaagtctgcaatagccttggaagccccctccttcaccagtacataagtgaacaatgtggaggttccgatgataaaaagggtgttggcagaggtgatagctgattccagcaaacagtttttgaatgctttccaatctatggtgtgatataccaccactgcaatcaccagggagtaggccacagcgatgctggaagcttccgtaggagtgaagcttccagaggtgaatccggccaggataatcagtggagtgatcagggacaggatggagccaaaaaactgcttgattagcgctattatatcgaaaggatgacgctcaaacctatatttcactgcaaagataaaaaccagaaccatcagggcaacccccatgagaaggccaggcagtacgccgcccataaacagctttgccacactgacactggcagtagcaccgtatataatcagcggaatactgggaggaaatataggcccgattactgaggaggctgccgttaccgcgccggaaaaattatcccggtatccattcttggtcatagcttccatctcaatggtgccgaggccgccagcatccgcagcagcgcttcctgacatgcctgcgaaaatgatactggccacaatattggcatgacccaggccgcctggaatccagcccaccagttccttggcgaaactgaaaatcttgtcagtaatcttaccggcgttcatcaggtttcctgccaggataaacagagggatggcaatcagcagataggagtcaacacctgttaccatcttctggccaatgaccatcaaagggtaatccagtaccagacaccccaggaccgcactggctccgatggagatgctgatgggtactcctatcagcagtaatattataaaagtgatgaaaaatattgtcattttaccatccctcctttgctgttgtcctctggtgttttaaccataatccgctccagaagctgatagatggtttttactgcaatgaatccgcctgcgattgccataggaagaaaatgccaggccttcgataagaactgcatagttgaaaaatggctggtactgttgatcttatacatgcctgcgtaggccacgatcatgacaaggcccaggcccaggctgaaaatcttgttgatgaaccagaatatgttctgcacattcctgggagcccgtacatagagcatgtccagagtgatcagacgatccttgtcataaagtacaatgatgcccagaaatgccatccacataaacaggaatccgcaggcttccgttgaagcgcggaaagacttgttcaagaagttgcgcagacacagctcgtagagcatgattcctacaatgcctgccaccagaagcattaggacagcggaaacaattttcacgaaaatgtctgtgattttcttatatatattcactgtaatcactcccttgaatttaagaggggctgcatcccgggcgggagtggagcccctgttttatcagtcagtcttattatttagctaagatttcatccaggatctcctggttgaaccaaggctcgttggcataacgcgcatagtattcctcgccgcccagcttatccttgaaactttggatatcaggattttcgtcaaactccacgcccgcctcttttaaagttttggttgcagtttcattatcagaagcgatggtatcaaaggagtatttggcggcagctttagcctgttcttttaagatcttctgatattcggctggaagcttgtcgaatgaatcagagttgacagccatagtgcagcccatccacatatagttgataaagctgaaatacttgatatcatcgtaggtggcattggctaccagatgataggtggcattgtcctggccttctgcggtgccgttggaaagtgcaattgccagttcgtttaaagccagggctactgggttggcgcccagggtctcccagcagtccagatacatctggctggtgggaacacgcagcttcagtccttctacatcagcagcagtatgtacggctcgattggtggtggatacctgacgcattccgttgtcgccctctgccaaataaaccaggccggtggaaggaaggtctgcgaagatcttttcaccgattttcccgtttacaacctcgtaagcctgctttgcactgtcaaagataaagggcagatccaggattttggccttgtcatagaactctgtaaaaccggaggtccctgcaaaaatgatatcaatagtacccatacgcgtggactgaagagcttcagcatcgttgcccagctcaccggagtggtacgcatccagggtgattttgccgccggaagcctcctcgaccagctttttgtattcgagtatggtcttagtaggaacggaattttcgttaccgggagaatataatgtcagtgtaacaggttctaatgcatctggattggatgcagcttcgctggatccatcggcaggtttgtcagcttctgtagcggtagtggtggaatcagtagtgctcgcgtttttgtttgatccgccgcagcctgctaaggacagcaccatggcagtggatagagcaatagataacatttttttcattgtaaccctcctgtaagtagtaaattgtatgattgtatgatgtctgatgtactaacaatattataacatgataagattggttgtctatgcataaaagatataaaaatacctgtatattttatgcgatatgcacaaaaacgtgtcagcataaagactcacatccaacaggctaaagcccataacaaaaaatcccagcgatattggcatcattgccatatcactgggattcattattttgtagtggatttttccagatcagttgcaatcaggctcaaatgttcctgcatatttcgctcgcctgccgctgcatctttcgtcttaaaggcatccagaatcatctgatggggaaggattgcattttccgcattctgagggatatagaaggttctgcttcggaaattcttcatattcttttcaacttgcttgctgatgctaatcagcagttggttgcggctgtattccacaatatcagcatgaaacttctcatcataaatcacgatgttgggaacgtccttgttattcactgcggtgatgaacttctggtgaagacgttcaagatgggctacgtcctcgtcggagcagcgctctatggcaagacgcacggacagaggttcaatggccatacggacttccagaaaatctttagtctctacctcatgttctgtgaaccactgcataatgtcgtccagttccacttcagaagtccttgcggcaaatgtacccttgccgggtcttaattccacatagccagtggcttccagcatccggaaggcttctctcacagtaccacggcccacttccaattgttcgcacaattctttttccacaggtaatttatctcctacggatacttcaccggaaaacagatattcttttatcttttcaactacctgctgaacaacaggaacccgttttactgactccataagaatccccctttatgttatgtactttaattgtcttagagtaatacatcatacaatttaatgtctttatatcctaataccaaagcatggttttgtcaatatggaatcatttaataatgtttgtaactattgacatatttgaatgcgtctgctattctttggctatattgtatgattgtatgatgtcggtaaaactataacttactgattgtatggaggaaaaacaaatggatattgcaagtatggaaaaaacttgccgggcagtacgccgtgatattattaacatgacagccgatgcagcatctggccatccgggtgggtcattatctgctgtggaaattattacgaccctgttttttggaaagatgaatattgacccagctaatccaaagaaggcggacagagaccgttttgtgctgtctaaaggacatgcagcgccctgttactatgcggtactgggggagaagggcttttttgacaaggcggagtttaaaaactttaggcagcttcacagtttccttcagggccacccggatgctaagaaatgtcctggtgtggaggcatccaccggatctctgggacaggggatttccattgctgtcggcatggctttgggtgctaagaaactggatcacagcggcgttaaggtctatacgctgctgggagacggggaacttcaggaggggcaggtgtgggaggcttccatggcagcttcacattataagctggacaatctgacagttattattgacaacaatggccttcaaatcgatggtacgaatgaccaggtaatggggctgggagatttaaatgccaagtttacatcttttggattctatgttctggagatagatggaaacgatgtggaggctgtatccaaggctcttgacacagaaactgatggcaggccaaaatgcatcatcgcacggacagtgaaaggcaaaggcgtgtcatttatggagaaccaggtgggctggcatggcaaagcgcctagcgaatgggagcgtcagcaggcattaaaggaattggaggattaatcatgagcgagttaaaagcaattcgcgccgcctatggagaggcgctggctgaattaggagagaagaataaaaaggcagtagtgttggattcggatctggctcatgccactatgactgctacatttgcagataaattcccggaacgttttttcaatgcgggaattgctgaggccaatatggtagatatggcagcgggcctttctaccatgggatacataccgtttgccagcacatttgcattatttggcgcaggccgcgcctacgatcaggtgagaaacggctgtgcataccccgattttaatgtgaagctgtgcatgacccatgccggaatcaccctgggcgaagacggcggcagtcatcaggcaattgaggacctggctctcatgcgggtaatccccggaatgacagtggtggttccctgtgatgcagaggaaactcgccgggccgtgatggcgctggcagatatgcagggacctgcctatctgcgtctggcacgcctgccatctcctgtatttgaggagaagatgccctttacaatcggcaaggccaatgtgctgagagagggcaaagacgtagtggtatttgcctgcgggattatggttgccactgtacttgaatgcgctgagaagctggaagctgagggcatcttcataacagtagtcaatatgcataccatcaaacccattgacagggattgtatcataaaatacgcaggaaaatgcagcaaggtggtgactgtggaggaacatagtgtcattggcggtcttggggacgcggtgggagaagtgctgctggcagagggccgcggtgtgaaatttaaaaagataggtgtaaatgatatcttcggtcagtctggtaaacctgaggaattgctggaggaatatggattaagtgaaaaccagatttaccgccgtctgaaagaagtggcagagacttgagctcttgattttttttgagagcttcggctttttttatcagtgtggaactatcatgaatgctcagggccttagcaggaatcctaattcgggaatttggggagacctgcggtgtaattaatgtactttcttttcctctgattcaggaatttatagaggaaaattcagcgttctctgggtgacgatgcgcgggtttatccggcggcagacgtattaaccggagcaaaggactgcggacagactaccgtggttgtaggcggtggactggcgggatgacaaaccgcgttttttattatggtgttccaagccaagtcgttatcagtaccgattgactgactaaaggacagaaaaaaaatattgaatttcagcattttctccaatgttattattaacaatttgagtatatattatattgaatttttctgttctccatattattattttagtaaagtacatgataaatgagacaagacaaaaatgatggtggcagtcatggtccgggaaaattagaaggatattcggctgtccaacagacgccattgtaagttttttacttgaaagataaggagtttattagagacatgaaaaaagaatacattaatatgaatgtattcgatgcattgcagaagagatttgcgtttttgtttcaggaatttaaaaatatttatatctcattcagtggcggcaaggatagtggtgttcttttgaatttgctgctggattaccggaataagtatgcttcagatcgtgtgattggcgtattccatcaggattttgaggcgcagtataccgtgaccacggactatattacccgcacttttaagcgattggaaaacgaatctggcatagacctttactgggtctgccttcccatggcaaccaggacagcactgagtagctatgagatgtattggtatccttgggatgataccaaacaggatatatgggtgcgtccgataccggagtatccctatgtcattaatctgacgaagccttttacccactatcgttacaggatgcatcaggaagatttggcaaagcagtttggccgattctacaaggaggagcatgggaatggcaggacggtctgcctgcttggtatgcgggcggatgaatctctgcagcggtacagcggatttgtcaataagaaatacggatatcaaaacgagtgctggatttccaggcagtttaaagacgtatggtgtgcttcacctttatacgactggtcaaattctgacgtatggtgcgcgaattatcgcttcgattatgattacaacaatttatatgatctgtattataaggcaggattaaaaatagaccagatgcgggtagcatcgccttttaatgattactccaaagacgctttgaatctgtaccgggtcatcgacccggaaatatggacaaaactggtggggcgggtgcgcggagcaaattttggcgctatttatggcaagacaaaagcgatgggttaccgcagtattacgttaccggaaggtcatacctggaaatcctacactcaatttttgctggatacattgcctgcccggctgcggaataattatgtgaaaaagtttaacacctccatccatttctggcgtgagaccggaggagggctgccggaggaaacaatccgtgagcttgtggaaaagggatatcatatacggaggaatggtatctctaactatacaatcaataaaaattcccgtattatttttcttggaccgattcccgatcataccgatgatatcaaaagcacgaaagatataccaagctggaaacggatgtgctactgtattctgaaaaatgaccatacctgtcggtttatggggtttgggcttacgcggcagcaacaaaaacgtgtggatattattagacgcaagtacggagggatgatagatggtaaataaggaattcagaagcccggtataccatatcattgcggtaccatttgaaaacattgtacccaatacatataacccgaacaacgtggccccaccggaaatgcggttgttgtacgacagcatcaaggaggacggttatactatgccgattgtctgttattatgcaaaaggcagtgataagtatgtgattgtagagggctttcatcgttggcgggtgatgcgggattacccggatatttatgagcgtgagaaggggatgatgccggtttcgataatcgataagccgctgtccgaccgtatggccagtaccatccggcataaccgcgcccgtggaatacatgatgtggacttaatgagtaatatcattaaggaactgcacgagttaggacgttctgacgcgtggatttccaaacacctggggatggaccgggatgagattttgaggctcaagcagattactggcctggctgccctgttccgcgatgtgaagtttgggcaggcatggctgcctggggaggatgcggttccggccgaagaggcttccggtagtgggaaaacgcatacaccttaggaaataattaataaattctttagcattaaataatacaataattctacagacccaatataatgttagaggggataaatatcatggaacatgtgtggattgaattgcgggctttgtcccatgtttttgaataaaaactgccccggctgcggccgcggtgaaggaaaccaggcatgggaagaatactggacatgctcctgtccgttatttgtcagagacaaacagcaataaaaaggattgagaaaagcaaaactgaaaggaatatttatatgaagtacacgtgtatgcttatttcggtggccgacattaatgctgcaaaaaaattttatgaggatttgtttggattggaagtatttcaggattacggaagaaacatcgcttttacctgcggcctggcattgcagcaggattttgactggcttgtgaatctgccgaaagaaaaggtattaaagaaatccaacaatgcggaaattgtctttgaggaacaggactttgacggctttctgaacaaattgaaaaaatacccggacattgaatatctgggagaagttatcgagcatagttggggccagcgggttattcggttttacgatttagacggacatatcatagaggttggggaggatatgaaaatggtgataaagcgttttcttgcctctggcatgactatggaagaagtctctgtgaaaatggatgcttccatggaggatttgacaaaacttctgaatcgttaatacgctgtggatgaataagcaaatatggatttgtaagtcacattataactcagattttttgcaaataaattttggtttcccttttcaaaagctttgtaaccagatgattgaaaccgatggaggaaacgtatatggatattcagaaaattatcagcttagtaacaaagacgcaggggttaataaagaaccgtgaaatggccgctcatgtgaaggagaagggtcttgcagactatgtaacgcaggtagatattgccgtgcaaaatttcttaaagaaggaactgtttgcccttgcaccgaatattcaatttcttggagaggaaaccggattacaggaaataaaaggggatagcttttggattttagacccggttgacgggactacaaaccttatgcacgactatcagcacagcgttgtatctttagccctctgccgccagggggaaattgttatgggaattgtatacgatcccttccgtgaagaagtgttttcagcgattaagggaaagggcagttttctaaatggacaccccatacatgtatcaaacgcagaaaaactatccgatacaatgattgggctgggaacagcaaaaagagagctggccgatgaaaactttgcccggttccgcagggtgtttggtcagtgccaggatgtccgcaggattggatctgccgctctggaactggcatataccgcctgcggcagacagggaggctatttcgagatataccttaatccctgggattatgctgccggtatgcttttaattcaggaggctggcggtcaggtaactgattttatggggaaaccgcttgatccgaaaaagggcagcagcgtagcgggaacaaacggatgtattcatgttgagctgttaaagctgctgtaagccatatgttcccttttcagaaattgtagagaaaatttaaatccggaattgaaaagcggaaaattatagaagttaaaaagggaaggatagaatgaaaaaaattagtcgggaagcagaacagataatgattgagcgtttcggaaaagacacaataatagcattggcaacaacggaaaatgaaacgccttatgtgcgatatgtaaatgcctattacgaaaatggtgcattttatatcattacatacgcactctcaaataaaatgaaacatataaaggataaccctgttgttgcaatcgccggcgagtggtttacagcgcatgggaaaggcgtcagcctggggtatttcggaaaaaaagagaattgtataattgctgaaaagctgaaaaatgtctttgcggagtggattgataatggacataataatttcgatgatgaaaataccgttattctatgtgtagaattaacagatggcctgttactctcgcatggtgctagatatgagttttagccatttaaattcaactggtggttttgaaattgattttcaagccgcctttttattttcattgattttgataaattctgccgtttaagtaatgcggtattaagcgaaacaggaggctccggcctcgggcttgcttaccatacaaaggtggtgattatcttgaaaattcgcagcgaatttacttgtccgttagaattggttcacgatatggtaaagggcaaatggaaacttattataatttttaatttgaggaaaggctcttgctcattttctggtttgttacatagcattgagggaataagtcaaaaaatgcttttggagcaactgaatgaattaaaacagtttggcttggtcgagaaaaaatcctacgctggttatcctctcaaagtaacatattttctaaccgctatgggcctaaaaatgctatcagcgattgagataatgcaaggcattggtatagaatatatggtaaaacacggaatgtcagaaattcttgatgaaaaaggaatttgttattgacgctatacacaaaaaagtaagtaatttacttgctggcggctttcgtgtattattttatcaaacagaaatgtagaagggatttgataaaatgaatactgcattagtaataattgacattcaaaatgactattttccacaagggaaatgtgagctttttcaatcagaacaggcactaaaggtcacaaaaagattgctggaacattttagagaaaggaaactccccattttttatgtacaacacatatcatcagagggcgcagctttttttcttccaaatacgaaaggcgttcaacttcacaaggagatagaacctttaagttcagaatatattattgtaaagcatacgcctaatagctttcatgaaacaacattgcaagaaaaattaacctcattgtcaataaaaaatttggtaatgtgtggtatgatgacacatatgtgtgtagatacgactgtgagagcagcaaaagaccttggtcatttggttactctcatatctgacgcttgtgcaacaaaagacctagaatggaacggccgaaagctgcctgcaagtcttatcaatgatgtatacatggcttcactgaatggtaaatttgcaacggttatgtcaagtacagattatttgctgtaaatgccacgtcaatccagactgtcacgattgtaccttttccatcaaaaacagcgtcctatcgagtgacaggacgcaggaaacagcacccgctgctgtgacacaaaacggaaagcagcgtctttgatttctcaaaacagccgttttatgttgctgcacaaatagcattttcttttttgttaatcctcactaatctccatcattatgtggacgctttttgggattctttttatcattgtattttttcataataaccatttttagtaagccaacgacaatcaaaaccgcggcaatgataatccaccagtattgctccataacctacttcaccccctttcagttgtcttaaatcatctgccccgtcctatgcagaatggagaagttcattatcctgccagcttctgaaacagacgttttgtaaggaaataataccagattaaagctgccgccaaagccatgggaaaataaagaaccgcctcattctgtacggctttagctgcccaaaatgatggaaggaagccaaccgcaaactggcagtaactatcaatcaagaatggggctggtattcctagtaatgtaagtgcagccagttttgtaactgccattccctccagtttattagctgaaagggtaatgatcatcagggctaccataatagcctggaccgcccctaaaacggacaagcctaaaaccatgatgacggaccgtttttccaatgaaaagattaacatcacaataaatgtaacaaccgttgacagaattgcaggtattccaagccttgaaaaaatatatcctgattttccaagcggagttattgaaaaatacctggaaactttatcatcaatttcttctaaggtaatcatggcaaaagcaaaacaaagaagcactggcgccatgatagaaagaaataagtcaaacatcggataatagggctgtaaagaaaattttgccgctttttctatcaatgggattccaaatttaataagggcgccaaccagaaacggggtgaaacaagctgcaagcatcatgggatccttttttatctgttggaatacctgccctatgctgttaaatacctttttcatatcttcacacctccaatactccgccacatttttgataccattttatgtgctgccggatataatacaaaatttgctgcaagaaccagaaccaaatccaaaaacgggttctggctgtaccctgttattaaattcatgcaggccataaatggaaagaaccgtaaaatttccggcaggtctgtaaataatcctgcaatgggcggagcaaagcataaaatctcaatgggcataattacaattaaaaactgattcaggttcgcaatcttcgtggcagccatgataccgagcatagtaaaaatcgatgatgttaatgctgtcccgattatgatacctgataggttcttatttcctgccgcaattcccagtatcaatgcgactacacaggatataaacatcagtgaaaataccttggcaaggatgtactcggatacttttgccggcgatatggcaatcgcatggagtaccttttgacttttttcaagtaaaacaatcgctcccatgaagaacagccccatggccgccggatcggaataaatcataatggcggctgcattgtgtttccagttatccggtaaagctgtaatgccgaagatataaatcacggtcaaaacaaaataaataaagtaaaagccatatttccattggaagtgaatatcgccgcggactaatcttcttaatttcattgcagcgtcctccctgttatatccacgaaaatatcatttaatgtcggctcactgctgtggacagagcgaagactattgcttcggataagttcatttagccgtttatcatccgcagtttgtgtaagcatgcattcacccgtcttttctccattttcaaaataggcgtaccggattttagcggcacctcttgacatgataagattatgtggggtatccagggcgctgacctttcctgatacgataaaagcaacctgatcgcacagttcagttgcgtcaaacatattgtgcgtggtaataataatcgtcttcccgcgttttttctcggcaaggataatatctttcatgagcctgctgttggtaggatcaaggccgctggtgggttcatcaagaaaaagaatatccggattgtggaccagggcttttataaagttcagcctggaacgcataccttttgaaaaatcggaaacctttttatcaccgtcattttccagccccaccattcttaaaagttcttcagtggaacggagcggccggtcatacagggaaccaaagtatttcagattttcgcgtgcggtgaatttctcataacaggtggaaaactcaaaatcaacgccgatacgctcgtaaaatctgttagtcctttcgcggatttccgttccagctactttgacactccctttatatcttgtgttaagaccggtcaggactttttgtatggttgatttaccggcgcctgatggccccagaaaaccgaagatttccccccgtcctacgtgaaaactcacattttcgacaaaaggcttgtttgtgtagctgaaacataatttgttgacttcaatcatttttacttcctcctttttggatatatgacgatttataaaatatagtcacatgacgattaaaaaaatgtttggctacctgtcagccaaatagccaaacaagtgctgctattttttaacaacctgttccacgataccatcaactaaaagtgtttgtatctgttctaattcttcatcttccctgaactgctccaggcaggtcaacacagaatatagagatttaatcaatacagtatgaggaacggtaaactgtactcccatttgctgcaacatttccaatatgcggatatcattgtacatatgattactgaaaatatcaggggacaacttccgttgcagataatccattatggataaatcaatctgcgacaggatgggagaagtaatgattccggtaagactcatcataatgacgtctttggttaaagccttttgcgtaggataatgcttcttcttcaccactgtttcaatattttcaaaaagtttctgctgtaattgaaagttgatttcgatatacaggtgttccttgctgggataaaacgcataaaaggagcctttggaaatattggcggcaacagctaaatcatcaacagtcactttctttaatccatgcagggaaaaaagtttttcgccttcggccagtagtttatcactaataaatgctttttctttttcagtaaagcgcggcacttttatcacctcctagtgactaaatgttcaatatagtcatatagaatatatcacttatggtccgcattgtcaattattatctaaagtaattaaaaaaaatgccacagtgccctagcgatttcctgaaaaaaagcgcattgtgtgataagcccggcaaaaaataagatgatataatgtgaacatcaaatacaggaggtacaacaatgtacgcatgggaagcaatcgaacaatccttaacttttatcgaggaacacttaacagaagaaatttatacggaagaactggctaatatagttggcctgtcccctttctactttcagcgtttgttcaagcggctggtaaataaaccggttcaggaatatgtgaagctccgccgcctggcaaaggtgattgaaaatctgggtaataccgaacagagaatacttgacgttgccctggactatggctttacaagccatgcaaattttacgcgggccttcaaggaaacgtatggaatcacacccgaagagtacaggagagatttaccaatgctcaacacattcgacaagccggaagtctccatgaattatgtcttagtagatgaaggggttccgctggtggtaggaaatatcgtcttggaaatccagagaaaaacgttggcggaaccggaaatttacctcggcttggaaacggaagttcgtatttctgaacaaattccggttggtgaaagcacaggtgtagacgtgccgggacagctttggagacgctatcatatggagaaggcgtcaatcgcagcaaatatcaatacaaacgtagaaatgggaatgtcccatacccaagatacggcacagggtcttttcacgtattttgcgggtggtcttattcaaaatatcccgcatcatcagcaggaatactttgtaaagaggaaactcgcggcaggagattacatcgtttgcagaatcgaggcagaaaattttgaggatttggtaacggatgccttgaatcagggtggaaaataccttttcggtacatggctgccgcatcacaacttaacaacggagcctttctcagcagaaaagtattatcgtgacctaaaagatatggcctgtatggaaatttgggtcaagcccttaccgttggaaaataaaagataggagggatattgggatggattggaatatgctttatacagcgggaaatctctataccggaagattgagttaataaaaacaaataaataatatccagattagcggggcggcttttggcggctccgctggctttttatactatgttcaattttggaagtccgcgtccggtctgtcacgtctgtaataatgctcttttctgtttccagattatgcgttcctaagtattgatacggtacttttcggctttttgacaagcggatatatgtcactcagagaactcgaagacagctgcaaagtaaatatccgattcatgtatttaatggacaatgaacgtccctcaaatacaaaaaagtaggtgacgcggttggtaacactaatacagaatacaccctgacacacaagcttttcagcgattagaaatagcatctgctctgagagatgataataaaaaaattgccagaacaattgaatacattttttattgataaacagagcatttttatagataatcagataaaggagaagcgttatgattactgtttcaaaaagacaaaaggagattgtagaatacctgataaaacagaccgattatgtaacgatctgcgatattgccatgaaattttctataagcgaccgcacatgtagaaatgatctgtcctccatcggaacatttttaaaagaatcaggactttctctctcaagaaagactgggaaaggcgtttttctgaactgtacacccgaagaaaagcgaaaaatatctgagcttttaaaaacagctgacaccaggttttacaacagaagagaacgagaaaatctggtcattgccctgctgctcatcagtgagaccacgaccttccaggaattagcagaagtatgccttgtgagcaagcagactgtaatcaatcaatttgattccctggaacagcggcttcgcaggaatacgctggcgattgagaaggtgcccggcagaggactgcatttaaaaggtgaggaaaaaagtatccgctttcagtttttagagcttcttggaatggagctttgcaaagaagaaatatacagcctcttctcagaggacaaatccatctaggcaaatttcccgactgctacggcaattgtcaatgacatacaggagctaaaaaagatacagttcgtggactttaaaagaatacagctcatactctcatacattttaagccgtattgaaaacggtcactccctgaggaaaaattgggtatacaaagatgattccgatctcaaaaaggtcattgaaaaatatatttcaactgactctgagcagtattttatatgctctcttattcaggctgagagaacaaaccagcctatattaaacatgagtacgcgggatgaagcacaaatgatatcccaggagctgatctcatcactcgctcaagtataccccattgagcgtgattctctccgtgagatcatagacggattgacggtccacctaagagctgccatttaccgcagtcgcagtaaaatccatatccgcaacgaattgctaaatgaggtcaagatgtctgtctctttaatgtttgaatttactctgcatgaaatgtgtaaagtagaagaaaaatacggcattgtttttgatgaaaacgaaatcgcatacattgccatgtatctgacttcaatctacgagacaagcattaaggaaactgtatcgcttgatatacttattatctgctcctatggagtggccacaagtgcagtgttaaagctgcgtcttgaacgtgctctccctgattgcaatatatgggggccatgctcactgattgatgcggatgagtatctacaggcaaacaaaattgatctgattgtatcagccaacgattacactcacgaccacatcccagtaatcgttgtagagcctttattgactcaaaaagatttggagcaaatacgtcaaaaattatatcacgattcttattctttgatgtgctccacttttttgaagtcttactcactccaagtagacagacattgcatcggaaactacatctcacctcaggatatacagatacttgatgcgtgtgattcttggaatgaagccatacggatcgcctcgtctccactgctaaaaaagggagatattgagcagagatatatcgaggaaatgataaatgcagtaagcaattatggtacttacatggtactcaccccggaaattgcctatgtgcacgctggtgtgaacgatggtatccacagaaactgctctgcgctgcttctcttaaaaaagccggtgatcttcggcaactttaataaaaagaagatctgtgcagtagttgtccttggaataaacaatcgcaaagaagacagtgacctgctcaatcttgcctatattcttgggaaagaggaaaacctaaaacgcctaaaagaaaaagatatcacaattaaagatattttagaactacacgattaacattcatctgaaaggagaaacttatgtcagccaatatatctttaaacaatatcctaatcgggcagacagcctccacctggcaggaagccatccagacagcagcagccccgcttgtcacgaacaagtcaatcacagaagagtatattcatcagatgatcgagagcgttgataagctcggtccatacattgtattaatgcccggctttgcattggctcacgcttcacccggaaactttgttctccacacagacatatcaatcgcaacattcagagaaccgattgatttccacagtgaaaacggacctgtctccgtcgtgatgtgtctggcctgcactgaccgcacatcccacatcgaacagcttcaggtaatcgctgaaaagctgatggaaagcagcagtattgataaaatagcagcctgtaaaaataaagaagaattattttctttatttcgggaataaaaaaatgatgaaacaaaatggaggtgacacattatgaaaaagccaaagattcagacagtatgcggctacggctgcggttcttccctcatgctgcgcatgaacgttgagaccattgcaaaacagcacaacgtagagattgaagccttctgcggagacgtggcaacctgttgcgcaaatgattgcgatgttatctttatctcaaaagagctcgcacagcgcattgaagggcgcgcaaaagttcctatcgtcgttttcaacaacttcatgaacaaacaagaagtggaagagaaaacactcacttatttcgagacattaaaatagttaaacaggaggatgttatgggagtcttcaattttatcatcaatgagatttttggccagggggcaatttttatcgcattgattgcatgtatcggactgatccttcagaaaaaatccttttctgagattatccgcggaaccgtcatgatagcagttggcttttttattctgtccactgggacaggccttatcaccggaagttctattgacggtatatctactgcttttaacacgattgtgccgcgggcagtagaatcaaaaacagttgacatcggcacaatgtatggcactgagatcggaatcgttatgatcgcagcctttgccatcaacctgttcatcgcgcgcttcacacgctggaaatccattttcctgacagggcatatgttatattggttcccatacgtttttatcgcagctggagttgatgcaggtctcacaggcggaaagctgatcattcttgccgccgctttcacagcgctttatatggtagtttcaccaaatcttatgagaccatttgtaaaaaaggtaacaggggatgattccttcacaatcggacacccgacaacctgcttgtccgtactttccggtcttctcggaagagctgtggggaacaaggaaaaatctactgaggaccttaaaataccctcatcacttggatttttgcgggaaattgctatcactggttccttcgcgattgcggttacatatattgtcatgtactgcatcctgattgccaacggctacgatccagcacaggtatgggaatatgctgaggggaaaaccggcatctttacatacattttcacccacgctatctacttcggagttggtatcacgatcatgctccagggtgtacgtatgttaatagcagagattgttcctgccttcaaaggaatagcagataaattcgttccaaatgcaatccctgcgctcgacgtacctgtaattttcccatacgcgccaaatgcccttgtgatcggcttcttagtggcaatggtgacttcaataatcacaattctgcttactgctggcatgtttccgacagttgttattccgcttgtctccacatgcttctttgagattggatgtgccgctatcattggaaatgccaccggaggagttcgaggctgcgtgatcggtgctgcggtttccggtattatcatggtattcctcgtgggctttggttcttatttcttcaacaacacgattcaacagtggatgctggtttatggaggacaggatttctccttgtggggaattattgaaggactgatcgcccgtttgatcggataagccataacataaactgcaattgacgtaacggttcagtaccttcatagttccgggcaaaagtccgtcctaaaatctgcattccgtttcggtccgcgccgacttcatcgatggacttctgcctgtctgtactacgttttcttacggtcagcgcagcaagtgcgcagacctactgaacagttaccaattgacaataaaaaggtggatattttatgagtttcaaatatatagatcgtatttacgagcttctcaagacgattgagaccgaagaatgtgaaaatattaaaaaggcagttgatatgctctatgaatgtgtgaaaaacaaatctaccatttacacttttggcgcaagtcatgccggtattttaagtgaagaactgtattaccgcgctggcggacttatgctttttaatcccatattcggaagagagcttatgctcgactcaagccccatcaccctgacgagtaaaatggagcgctgtactggctatggaaaaatgctggcagaaagcagagctgattttcaatccggcgacgtgctgattgtgcactccgtgtccggacgcaatcccgtagcaatagaaattgctgctgaggcaaaagaaaagaaatcccatgtgattgctgtcacaaacctttcctattcaaaatcagtaacctccaggcacccttccgggaagcgggtatttgagcttgcagatatcatacttgacaaccacggtgatatcggtgacgcctgtgttaaaatcagcggattagaacagaaagtatcgcccacatccaccgtgatcggagcagctatgctcaacactattgtagcagaactcgcccagaaaatggtagattcagggatcgaaaagcccccaattttttacagtgccaatctggacgggggagatgagctaaatcagagaatgtaccaagagtatagagaagtgatacggtataaattttgatggaatcagtctgtcacattcaaagtcagcagacagcacaagagaggcaccccgtttagagagggcgcctctcttgataataattcatataagaatctgccagataaaaagctcttgcttggaaatacggactatgggacatactgtaggcagaaacgccgacgggacgaaggcgcagggattagataaataagttaccattctgagctgcgggaagtaaataaggaggaagaattaaaaaaagtggcatagactttcaactttttttgtccaaagtattgacatatgtgcatcctgcatgagaaaattgtccagaaaggctggtctgacagagatgaaaaaggcgggaaaacagaggctgtttattgctgcaggtatccttattctagcagtgaacggatgcggcagaaaaacacaggaaaatcatgatatgccgcaacaagcagcggtcagcgaagaacatttggaaagagaacaaccgaaagagaaccttgattccgatgcagaacatattgctgccctttatcgtgatatttacaatcaggcagctgggatgggaaccttaagtaacaaggaggtggtgagaagtatcgttgaaaggattggggaacatggttacgttgtggcagacgaagaaaatcagattgatatggctggcccggaacaggttttacgtttttgcaggtcggtagacgggaaacaggaggccgagctgacaatgatagtggtcaccagttccggtggattcattaaatataacctccatacagtagatggtacagtggatgtggtcagaggatattatcagtatgtaaatgggagactggaaaacatgagcacagtgagctatcctgtagattcatgggaatatacaaaagaaggctatctgctgtttgagggaagtcattattccgaaatctattatgcactttcacttagtgatgagccggaacatacggctctaagggtgctgccgctggatgaaacatgcaggaaattaaacagagcttatctgttgccagtggggtatggaggaaataatcttttccttgttgactggagcgaacagaattttggaaatttggatttttacgatttgttcgacaggttctatcctgatatttatgaactgccggttccttttgaggccaatgatgattcaggtgtcggggccgtttacaggatatcggcagagatatttgaacatgtcgttgaggtccatttcagaatagaccatgaggagctgcggaaaaagacaacctatattccggaagatcaaaactatgaatacaggccgagaggattttatgaggctgagtatccagatattccatatccggaagtggtaagctatgaagaaaaaaacgatggaaccataacccttaccgtgaacgccgtatacccggaagagaacacctccagagcattcacccataaaacggtggtccgtccccttgacgatggtggttttcaatatgtatcaaatcagatcatttttccagaggtcggctttgaaccatggtggcattcggaacggctgtcagaagaccagtggaaagaggtatatggagggaatgattagttgaagatttaagatggttattcagaaaggggactcgtttatcctgttatttttagtagtggcagtcggaagtttatttgcaggccggcagaagcaagcagacaggaagcaccgcgggcaatctcccggtcactgagcatttcccgcagggcccgccataccagaggattgaaccaatacaggataccggcaaggtccatcagacagcctgccagcgggtctttatctgtatggtttggagactccgggcggtggtcttcaacaggcccttgttggcatcttccgtcataccctcctattcgataagaattgtcatatctggattcttaccaaaaaggagacattttttcaaacccacacccctccttgtttcttgtagctgaattacaagtgctgtttaattcgcatttcgtacaatcaattccgcagatagaaattcattctattttcctccgtaaactcttatttttacaattttttaatcgggaaaaacatatatcccttcccggtctgtggacaggtaaactcgtgaactgccccgaccaatgtaatattattatccgccagatattgtattacttctggaaaaataccaccgttttcacgttctacatagatatattcatagccgggaattacccactttgtccaaccatcaggggcttctgcgtcatcattgcactccactcccgcaaggtaaagtcctttattaaagtcttcccaaggttgaaaggaacgggaaaaatcagacattgcaccccatattccgctaatgttcccattttcatctttctgtgccaaattctgaatttctccaaaatgggaattcgcttcatcccatagcttctgaataaagccagctccgtctgttgttgccccctcttttcttattacaataaaggactcttttttgcatctttcgattttcattgatttgtcattcctttcgctttatgttcaacactcaatcaatttatccgagtaattctttgtcctgccatagtaccataaacgctggcagagtaatccggcgattctgttataaagatgcagaccgttcctgggataactgcctttcctgatttcctctgcacatttttcaatctttctgtctgcttcccggatgatttcctgattctcttcgggggactttttcatcagctttacgtcatttttttaataaccgtgccgagcagcccgcgccgtctccgctaaacaatcccatagtagcaacacaaagtacttttttatccttccaaagatccggattggctttgataaaatcttttaccatgacgggaacgtttgaaaattgaacgggatatgcgaaaatcaaaaactggtttcatctgtattcctttatcctctactgtcaattttaccgccattgaccgatttcggaaagacctgaaaacaaaagccttcttaaaatcggtcaatgaaaaaataaagaagttcattcttttttaagattttttagaggttttttagagactactctgatagaatggataaaaaattcgcagaaaatttggataaactgtggatttgtattttatatgagaggagaacgaaatgaaaaagaaagcaggaaaaatgatcttattgacaggggtgctgtgcatcctgagccttgccgtatgcgcctgtggaaagacggaggaagcgccggatgcagaggaaccgcggatgtttcaaggagaaccgattcaggaggatgatataaaagatgatgtttctactccggaaccatctgcggaacagctggaagcgcaaactacaaccggtacatctgcggagtgggttgacagcactcctaatctggaaggagatgccaaagacctgaaggacggacagttaacggtggttgaatctgttacggaaaaatcagataacggcggggatatcatggtatcgcctggcagcggggatgattctgattttaataaggttgcagttacatacgatgaaaatacgctgtttgccatacaaacgatctacgatggaggggccagagctgaaatgtcagcagcaacagcggcagacctggcatccggccagcacattcaggtatggggaagtccttcaggcagcggcctgaaagcaacccggatctgtattgtaaaagtggcataaatgtcctctttttcgtgaaacatttatgaaccctgcatttctttcaccaaaaaaccggcatgtctgaaaaatattccaaaaaggtcaccttttcgcatctccaatgcgtgtcataggtataacagcatccaaccgaagaaggtgtatgtaacaaacaggattttagggcatgaagttaaagcagatagaaataacagaagtatccgttaatgtacatctgttggatagccggattggcggaagcacggttggcatacttgggattgtttgtaacccatgcctaaatgccggaggtgtcaaagagcagcatggacgctggatgtcgttggaatttcatcaaggttgatggtttcatcgagcatggaaaggaacaacgccttataaaggaaatcaccggaaaggagaacgtcagtgaaaacatataaacagctttggatgaaaacatatacaccagttctgattatcgttctgcttgttttgacagcgattctgtatggaatacgaaacggcagaagtaatggcaaaggtggtaacatccttgccggtgcaagcccggatacaagcgccttccagatgtattattttgatggggaaacggttgcggtcaggacgttgtatgacagaggtaaagaaaaggaactgattaaaaaaatcaatgctattcctcttctggaggcagaggaaagcgccctctcccagatggatattcctttttacgggttctggagcagcgataaggacggccatgatatttccgtggcagcatccggcggtgtctggcttaagaatgacgggacggtttataatggggatacggagttgtctcttttgtgggaacagatggaaggcaatgatgaggacgataccctgaatgtcctggattttcccaatgcagggcgcttgtttgcatatcacagtatcttccttctgaaagcggatgagcagacggaagaaggcccggagggtctgactatgacagtcgaggacatcgggacaagtgaaatcacggtacggattacgaataaaagcggggaggatttttcctatggggaatacttctccctccagaagcagatagacggacagtggtatacgataccggtaagggcggataacgttggtttccaggatattgccaatatccttccggatggggagagtgccagcgagacatacaatcttgatatatatggcacgctggaaccgggggtatacaggctggtggtggaaacactgggggccgagtttcttgtgggccacggaaggatggcaggaatagagggggaactggccattgaaccccgaaaggcgcctttcatttaaagcagataatgcaggaggatttgctgaaattgttccggaaaagatgtcggagggctttatagaaagggaactttcgaccggggaatatattgtctgcggaattgaggcagagagttttgaagaactggtgacggtgcatggccatttcaaaagccttgaagtataaaaaacatccggtataatcatatacaggtggtgatagaggatgtttcggattggcgaattttcaaaattgacacaggtatctgtccggatgctgcgatattatgacgaagcagggcttttgaagccggcagaggttgacaggtggacggggcaccgtctgtattcggtagagcagataccacggcttgacagaatccggtatctgcgtgacagcggctttcaggtttctgaaattgccctggcgctggaaatggatgaccatgcacttctggtatctcttaataaaaaatgtctggagattgagcaggccatacaaaaagagcaggagaggcttctgaaaatcgcagttgcgaaagaagaaatacaggggagtaaaagcgagctgcattaccatatttccatgaaatcaataccggcctgccaggtactctccctgcgcaggactgtaccgacctattactcagagggcgatttatggaaggagctttctgcttttgcagaaaaagaggagatagaaatatccagtgatacctttaccatttatcatgatacggagtatcgggagcaggatgttgacatggaattatgcgcccctgtaaaaaaagcgggtgaaaacagagagccgttctgttttcgcatgacggaggcggtaccggccatggccagcaccatggtatatggggaattttcaaatatcaaaaaagcgtatctggcttttgccaaatggctgcagaaaaacagcaattatcaaatgtctgccccggtacgtcagattgtacacaggggcccctggaatgaaaacgacccggcaaagtatctgaccgagctccagattccggttgagcctttacaaaatgtcctgtgaaacatacagggcatttttgaataaatgggtagtttgcagagctgcagcttatttttcctcttgtatcttacatggtgtgaggtattatactgctattgtaaacagaaatggcaaatgttctaacatgcacggagcagtttgcggatgcatgggcagctgtaaattcttccagatggagtgcatgtaagaatgtctgcgggatttaaaagcaggaggtacggtatggaacaatatcagttgaaaccgattggaacggtaagaaatgacgaaagcgggacatggattgtgttagagccggagtatattccgggtctggaagcgttggaaggattcagccatatcaacgtgatctggtggttcagcggccatgacagagaaaaagaccgaagtgtgctgctgacagagaagccttacagggatgggccggaggtaatgggcgtttttgccacaagatcgccgctgcgtcctaatcccattgccctgacagcagcggaaatcattcatactgatcaggagaaagggcttatccgggttactttccttgacgcagacaatggtacgccggtacttgatatcaagccttatacccccagtctggacagggtggaaacgctgggtgttcccgtatggtgtagtaagtggccgaaaagtactgaggaatcgggctattttgactgggggcaggttttcaatttttcataggaggctttatgaaactgcaggattacatggataaaaagcctgttctggaaaccggtcagctgatactgcgtccattgcaagtcagtgatgttgcggatttgaaggaatggatgggtgctccttcgctgtatcaatactggggaaagcgtcctggtaaaggtgacctgaacccggagctgttgttccagaaaaaagagaaaccaacaaaaagcctgcactggggtatcgtccataaaaaagacgataaagtggtgggggagatgtgggtctatctcattgaaaaggaccgtatggcaaaagtggcattccgcctgtccccggcttatcagggaaaaggccttatggcagaggcgctggcaaaagtggtggtcttctgttttgaggaaacgcaactgcaaaggctctggtcggatgtccacattcagaatattgcgtcatataaaacactggaaaaggccggattcaggcgggagggccatatccatgaggggaaaatggttaatacctggtgtgattactatttatacggcatgacgaaagcagattaccgggaatttataaacagtgtctttgacggctctgttcccatgctgttttcagccttgttatcccagaaatccttgtcaaaagaggagttggaggagttaaagcgaatgattaacgaggtggagtgagtctatgaaagtattgcagatgagccttgcggcttctttcctgattctagttatcatgctttttcggaagcttttttctgcaagaatgcccaggcaagttttttcctttctctggatacttgcctggtgtaagctgatgattcccatatcagctgggattcccattcctgtggcggatggattagccgaatttataccggatatacccccctcccacccgcatgtccctcccggcagggacctggcaggcagccaaggcatggccggattttgaccggaatatattaaaaatttagtggtctaccggcgctttgattttcggcctgtatttaggccatgttcattttgcaggcatgaagaaataccgcaccgcagttcttatagagaaatcttcctggatccacagttggctagaatataagaacttttttcgcagaatcacagtccggatttcggacgagattgattcccccttaacctacaacatcttattcccggttattctgcttccaaaacagacagactggagggacagggaaagcttggagctgattttggaacatgaactggctcatatccggcacctggacgccctgaaaaagctgtgtctggctgctgcctgcgtctgccactggttcaatcccctggtgtggattatgtatgcattggctagcagggatatggaactggcctgcgatgaagcggtggttcgggcagtggggagggataaacgaaaaacttatgccaatttgctggtagagctggaagcaaagagggcagggattaatcttctgacttccggcctgggtcaaagtcttatgaaggaacgtattcttcatatcatgcatataaaagaaaaaatctcccttttgggaatcatgctgtccattgcaatgaccataagctgcatagcagtctacggtgtggtgccatccagtgcttttactctggaatcttgggatgatgacccgacccttggagggatttttgagatgtattcggtggaagagtatcagaggattgtagaagttgttaaagaggacagaggagagggggatccggatgtcatagccatggaacgggatttggcccgtctgaaggctgacagagaaaaaggggagtttgtcatctataaaggagcgtttccgatagaaacagaaacggtcatggtagccttcaacccaactattgtcatgcggccggaacttgtgaaccggaatacgcctttgactgctgaaacatacagaaatgatatggaagaagtgccagagattttggaagatgcagcggcagatggatttttgacagaagcgcagaagaaaagagtactggacaaaatggaagagaatctggccaggctggaatacttgtgtaaaaaggagtgaatttaaattgaaaatatcagggaccaggcttggggtaatttcaatcatggtagccatatgcctgtcgggatgtacgagaaataatgattttgttgataactgtatgacctgaagaattgcgaggttgtcgttacagaagaaagcaaagaagacggggatgtagtcaggagaatgacatttcaggcagactggaagcggatcagggaaccagaggatgacccattgataaaaggaatgcttcaggccatggatgagctggaattgtctgaggagaaagaggcagcaaggaatatcatagatggatatatcgtggaaatgaatagtgagccggaatcggaaagaatagaaacaaagttcgttgcaaaaatttctctggaaaacgaaacgtttgagctgttttacccctttgtacaggagggggaggaaaccttgcttccattctgggaatatgtggaagaaaactggcttgaaaatactgagaagcggatgcaggaaggacacaagcgtttgaggagactgattaataccgaaaagggtttgaatcagagcttgtaaaaaacttgaaactaaagaggtctactatgaaagagaaatgggatctgtatgatgtgaaaagaaataaagcaggacttacgtggatgcggggaatggccatacccaaggggtactatcatcttgttgtaagcgtatggatacaaaatgaccggggagagtatctcctatcccgaaggcatccgaataaacagtatcctctctgctgggaatgtactggtggttccgtcctggcaggagaaaacagcttgattggcgccgttcgggaagtaaaagaagagctggggataaaactgaatccggcaaaaggacggaggatttctcagatatgccgtgaggagactcaggatctatatgatgtgtggatattctataaaaatattgatatttcggatatcatacttcaggaaacagaagttatagatgttaaatgggtgacaaaacgtgagctgttccgtatggcccaaaacggggaactgcatccattgcttgatgtcagtaatatggtaaaggaagctatttgaacaataaaataacctaacaggaaatgcacaatataaatcgtttaagcctgcagcgttaccaccagaccctgtcttagaaataggcagtgatatggtaaaaaaactagtagaagcgaatcgagaactggtgaaattggacacagcttcaaaactgataccaaacgttgaactatttatttctatgtacgttcgaaaagaagccttgatttcttcccagattgaaggaacacagtgtaccttggatgatgtgctagatccagagctagacaatacagcgaatctggatgttatcgatgtcatcaattatgtggatgcatgttcctatgcattggagagaattaagaaattacctttgtgcggacgattatttagagaaatacacgagaaattgttatcgggtgttcgtggacaggaaaaaaatccaggggaattcagaagatcccaaaactggattggagctgcgaattgctccttattggaagccaggtatattccaccgaatgtagaagatatgaatcaggcaatgtcagaactggaaaagtatatgaacgaaggggatgattatgatccgctgatctggattgcattgattcattatcaatttgaaacaatccatccttttttggacggaaatggccgcgttgggagaatgatgattttattatatttgatggaacaagatttgttggacaagccagtcatatatatttcttattttctgaagaaaaatcagattgagtattatgacaggatttcagaagtaagacgaagcggtaattatgaacaatgggtaacgttctttttagaagcagtatcagcggcagcgaaagactccttgataacaattgaagcactgtcaaaacttcatgagaaaaatcttggaatattaccaaaaacaactcgtaaaaaagataatgtgagatcactttttgattatatcgaacagtacccaatcattgatatcaaaaaaacagcgagtgctttggagttaagttataatacggtgtcaaatgcggtaaataaattagtggagattggaattttaaaagaaacaaccaatgcttccagaaaccgagtatttgcatatgaagagtattaaaaatcttaagaaaagatacttgagttttaaaaagaaaagtcatagcctccgatactggagaactatgacttatgggctcaaattcagattacttagcccgctatgcgcccttcatttgagccaaatctcccacaaagcggaacgcacagctggcggaaagcaattttcgagagtatgaaagtttttctgtaaatagctattaagcattaggtcttctatgataaaatctattatcataaggaggcctattattatggcaagaagagaaaaacagcccgtacacaaagtagtcatgacggaggggaaaaggaacatcgtccatcagctcctggaagagtatgacatccagactgcggaggatatccaggaagccctcaaagacctgctggggagcaccctgaaggagatgatggaagcggagatggatgagcatctcggctatgggaggtcagaacggtcggattcggatgattaccgcaatggctacaagcccaagcggatcaacagcagcttcgggagcatggacatccaggtgccccaggacaggaagtccacgtttgaaccccaggtggtaagaaagcgccagaaggacatttccggcattgaccagaagatcatatccatgtatgcaaaaggcatgacaacccgccaaatctcggataccttgatggacatttatggttttgaggcttcggaagggttcatctcggacgtgacggacaagatactgccgcagattgaagactggcagaaccgcccgctggaggaagtctatcccgtggtctacatcgacgcaatccattattccgtgcgggaggacggggtaatccgcaagcttgccgcctatgtcatcctcggccttacgctggaaggtaaaaaggaagtcctgagcatacagatcggggagaatgaaagctccaagtactggctctgcgttctgaacgagttgaagaaccgcggtgtgaaggatatcctcattctctgctcggacgggctcacgggcattaaggaagccataacggcggcattcccgaagacggagcagcagcgctgcatcgtacatatggtacggaacacgctgaaatacgtctccgacaaggaccggaaagcatttgccacggacctgaaaaccatctaccatgccgcaaacgaggaaaaggcgctggaggcgctggagaaggtgacggaaaagtggacgccaaagtaccccaactcaatgaaacgctggcatgacaactgggatgtggtatcccccatcttcaagttttccatggaggtcaggaaggtgatctatactaccaacgcgatcgagagcctcaactctacctaccggaagctcaaccgccagcggagcgtgttcccgggcagcacggcgctcttaaaggctctgtacctggccacgttcgaggcgacgaagaagtggaccatgcccatccgcaactgggggcaggtctatggggaactgtccattatgtacgaaggcagactgccggaataagagcgcacaggcataggtgtacacctatccggaaaggagctttccatgtatggattttcaaaatacgatgctcaggacaggtacgacagctataatactgtacaggtgaagttaaaactgaatatgaagacagatgcagatatcctggcctgggtcagacagcacaaatatggcagggacacttccgtccaaggggccatcaaggccctgatacgggaagacatcgccagaggccaggccgatgggacacaaggttaatccctctgcattttacattcgttggctgtctgcagctctgacagggattccatgatagacaggtaatcgatcccctccacaacagtccctgtgccagggtcaaacagttcatcgtctgcggtggctttcgggtcataggatttcagttcactgtcataccagctatagatatcactgtataagtcggctgcatgatccagcagggactgcagtccattgatctttgccctgatatcttcaggtacaaagggatcgtctgtttttagcttcatggcacacctcctgatgttttcctgtaagaagtgtaccataatttgatgggattttccaatacatcttgacagaatccaaaagcatccgtatagtaaaggtaggtggtcacgacatccacctacctttctcattaacttatcatagaagatctcaatttacagactttttttcatactctccaattttcggacacgccctggtcatcggctcaactatgtggtgtgattgtcagcgtcgcttcttctctttttccagcactctttttgcaatcataataaaatttaatttaaaattgtcttccgtatcattgacatccaggccggttttttctttcactctgcataatgcattccggacttcagcctcactgatgtgtaatgccgcagcgacagcaggaacctgttccttacacttatagtattttccaagaatcgtctgttcctcatcggttaactgcagtaaaatggtactgattaaagactgtccgtgagccagaaccatggcattaattgcgctgtatatctccattccgataaaatccagaacacggcgttcttttttgaatttttctccggcattaacggctcgcaggctgttttggtatgtgcgctcaatgccggtcaaaccgttttctaaagtgccgatgccgatacggataaagacgtctggcaggctcttctttaaaagttccagagctttatcacatgccatggtgctggcatttaataattcttcctttgtgtgtgccgccaaaaagagtgcggttcccttatcgcatgtaatgaactgcggggaatcaacggacttatttaaaggaccatatgccacaattggggttaacagttccattaatgcatgcttatcttcgtaggcgacaatcatgtcagagggatagagaaacgacatcgcaagaaagtagtccttgttaacatcaatgccgaatttttttccgacagattccatgaaagcaatgtcctcatagaaatgaattgtaatatcattaaagtatgaggaaaatgtaatattggtatcatttttgttcataaagcatatcctcctttaaattgtgagaaaatactaaaatatggtaaagtaaaactgaacctaaatgggaaaatcttataatatatcttcacattgagaaagtcaagagaaaataggaagtttattaaaaacaacaaattattaattacaaatttgttaaaaataacaaagaaaacggattgcattttataaaagatattattataataaattttttactctacttaacaaaaggatagggggaaggaattatggcgaaggtgagcgacttattacgtcttccggcatttaggggaatccatgtattgtctggggaaaatggacttcaaaggaaggtagagcacgtgactgtcatggaagtgccggatattaaacgatggctgaaaggaaatgactttctgattacaagcttttactctgtacgcaaaagcgaggaagctcagtgccggctgattgaggatttggcagatacgtgctgctgtgttgctgtcaaaacagggcaatatgttaatgttatttcagaaagagtaaaagagaccgcggacagatgcagccttcctctgcttgaaattccctttgaaacgccatatattgatttgctgatgaatgtaatgaacctgatttttgaagaggaaaacacctcatctatcctggaaaaatatgtaaaggatattatctatgaaaactataccgatgaaattcttatggctgagagaggacgcctctttggctttgaagcggatgaggactatttttcagcagttaatatctgcttcaggaaaaaatacataccttcggaacaggaaaagaaagcaatccgttttttatgccaaaccttacagcgctacctgctggacagcggttcaatccaaggatgtcccatgatccgtctggagaagggcttcttattactggcggaggcgaaggaagcaaaaaggctggagcagtatctggaaaattatttggatgaggattatttaaaaaaaatatggaaggcagagggtaaggggattgtgtgcggcgttggtcctgtaaaaaaaggcttaaaaggaatccgggattcttacagcctgtcgtttaaggcaatgaaggtggggtataccctttccagaaaccagtttctgcatttttataagaagctggaaccatactgtgagttggaaaagatattggtttcgccgtccgaacatgtatttaccagtgtcttaggggctgtcaaaaatcaggagctgctggatacattggttatgtattacgagtgcggggccaacatggaacgtgtatcagaccggatgtatacccacaaaaatacggtgaaatacaggctgaaccggcttcaggaactgacgggacttgaccttagaaatcccgatgataacttcagactatatttggcggtgctggcgttgaagatgaattttaaaataagtttttgaaaaaatgaatagaacagagtggtttgatagcatgcggcatagttggtattgtctatgccgttttttgatccttttgtttatttggacaaattatacagaaaaaccttgactcccaggatatagaaacaggattctaacgcaattataatgaatatatcaaggcgagggaggtgtttcaatggagcattgtattgctgacatccgatattgtgaaaagctgtttgacagtttctatgatataggcagtacggaaaatggcggagtcacaaggttgggctatacggagcaggaagacaggatgcatgctgtgctcacaaagctggggagagaactgcagtgccaggttgaagaggatgaggcagggaatacatatgtgatgaacaatcaggactcggattactatttgattggctcacatctggattccgtaattgaaggcggaaggtatgacggggtggcgggaatcattgcagggcttatggttatgaaatgggccaaagaagaaggaatgaaagtgccgatccgggtgggtgcgttccggtgtgaggagtccagtaattttggctgctgcaccataggaagcgggcttatcacgagggagatatacaagcaggatatcggggggctggtttccaaagaaggggaaacgctggaagcgatcttttgcagacggaagctgaacctgcatccggcaaaaatcacggggatacgccaatatctggaactgcacattgagcaggggaaggttctggaagaatcggggactaccgttggaattgttcagaccatagccgggccgagacggtttaagatgtatcttaggggaatggcagagcattccggtgcgacacctatgtgtatgcgcaatgatgcaatgtgcgcagccgcggaaatcatactggaattagagcggatcggcaataaggaagcagtataccagtcagttgctacggtaggagtggtgaataatcatcccaacgtgctgaacgtaattcccggcgaggtggagctgggggttgatatacgcggaattgaaagcgccagtcttgaccgaatcgagaaaagcatgcgggaggtggcgagacgaatttgtgagaaacgtggaattgaatatctggaggaaaagaccagcgacattccccctgttgatatgagctctgaggtacagaccggtttggagcaggccgccaggcggctgggaatcggcagcaggaagattataagcggggcaggtcatgatgccatgtctttcgcgggtatctgtgataccgggatggtgttcatcccctgtatgaaaggggtatctcataaccgggcggaatttgcgtctatctttcatatttgcgatggggcaagggtaatctatgaatacctgaaagggggagcagcatgattctgataaaagacggccgtgtaattgatccgaaatcaggtatggatgagcctctggatattattatccgtgacgggatcattgcgggcatgggaaaattccagaagagtgatgattatgacactgtgattgacgcaagaggaaaggttgttgctccaggactgattgatgcccatgttcatttccgcgatccgggttttacctataaagaagacttggaaagcggagcccgtgctgcggcagcgggaggatatactaccgtagtctgtatggcgaataccaatccggtggttgactgcaaagaggtcctttgggatttaagaaagagagcggcatccctgccaatccgggtgctcaatgcggcggcggtaacagtggggctaaaaagccagagactgacagatatggaagcgcttaagcaggctggagcagtgggctttacggatgatggaataccaatcaaaaatgtacagctggttctggaggccatgaggaagtcgaaacagcttggagtgcctttaagcttccatgaagaggacccggatctggtgggaagccccggcattaacgcagggaagattgcgcaggcgatgggagttgagggagcttcctccctggctgaggagacattgattgcgagggactgtcttctggcccttaagacaggggctatcatcaatattcagcacataagcagcaaggtatctgtagagctgattcggatgatgaaaggactgggagcaagggtatatgcggaagtgaccccgcagcatttttctcttaacgaagaggctgttctggaaaaaggaaccctggcaaaggtgaacccgcctttgagaaccgaggaggatcgatacgccttgattcaaggcttaaaggacgatgtgattgatatgattgccacggatcatgcgcctcacagcagagaggaaaaggcgaaggggattgaggaagcgcccagcggtatgattggacttgaaactgcattggctttggggattacctatcttgtcaggaaaggtcatatgactctgccgcatctgctggagaagatgacggtgaaaccagcagagctgtaccagctggacggtggaagcttaaaagttggagccagggcagacttaattgtgtttgatgaacgggaaaaatgggtggcagaacggtttcattcaaaatcagaaaattccccatttattggagctgagctggttggaaagataaaatataccatatgcagcggacaggtggtgtatatggatgaggaggaaaaccatgaatcataaattaattggaggtatctttgcggtactgtatcttttgtgtgtgataccattcccctttacaaagggggcgccggtatacttatttgggtggctgccttcatcactggcatactggtggatattaatggttgtgaacctgctgtttgttttatgggtttgtaaatgctttgtagattccaataaaaggaagggggaagaggaagaatgaatacaggacaaatcagtcttggaatcatactggcttatctgtgtttcatgctggctattaccgtcttaaatggcagaaagaaaaaacagaagaatgcggaggggttctttcttgctaaccgcggcgtcagctccgtgcttcttccactgaccatgattgcggccatgcagagcacattcgcttttttaggagcgccgggaatgtactatacacatggaatatcttatatttccattgttttaagtcaggtatgggttgccctcatggtagtttattttggaaacaagattcgtaaactggcaaacaaaaatggctacatgtctctgggagattatctgcaggaccggtttgacagtaagtatttaaaggtgctggcatcctgcatctgcgttcttatgaccatggtgtttttagctatgcaatatgtgggaaatgccagagcaatgaatatagtgagcggggatgcgatttcctacccggcggctattctgatatcggtagtcttttctctgctatatgtactgattggaggagcaggtggtgtggtattgctggatgccgtgcaggcagtgatcctcctggtgggaattgtagtagctgcatggattgccattgcgcctgtgggaggtatacaggctctattcacccagatcattgacaagatgccggaattgctttcaaggccggggccacagggaacatatacggataaatactggattatgcagtttattgtactgccttttggaatctggttctgccctcatatatggatgaaatctttgatggcaaaggatgaagacgctttggcaaaatcagccatcagtattccggtatcccagatactgatttatggctttgccactctgttcatcggccttgcaggacatttgctgttacagccccaacaggtgggggcggctgataatgttctgcctctgcttatgactacccgatccaaatggtttattgcagccctggttatggcagcggccatagcagccggtatttccaccatcaatgccatgctgctggtatcttcccagattgtttcccaggatttgattctgattaacggaaagggcaggatatcagaaaagaaaaatatgattttatccagaacgattgtattcaccattgcggcaatctgtggaattatggcgcttaacccgccggagaccctggttcagattgttcaggacgtagcgtatacaggattggctcagctggcgccggcattcctgcttggtatgtactggaaaggctgtacaaaaacaggagctgcctgtggtatgacggctggaatcgcaattctgttcggaacaagaatcatgaatgtagcgcctcttggatggccgggattcatgtggggatttttcaccaatatcctgctgacggttttagtttcactaatgacgaggcaaaaaaactttgcgttgaataaggaggacaagatgtcggagattttacataatgaaaggatttcaaaggatttttatttgatgaaagtaaaggctgaaaatacggctgccatggggcagttctatatgctccgggcatggggagaatatccgctgctctccagaccaatcagcgtgttcgatgcggatggacagactgtcagcttcctctataaggtagtgggaaaaggcacggagatttttgcaacgcttaagcctggtgatgaaattactctggatgggcctcatggaaacggatttccggaagcaaaaggaacggttgcccttgtaggcggcggcgtgggaattgcaccactgtatcttactgcaaagaaactgaaagagttaaatcccgatacaatcgtggatatctatcttggattcagtgatgaggctcttctggttgacctctatgagaaggtggcggataaggttactgtaaatataggaggatttgtcacggatgatattgaccctctgaaatatgactgcatcatgacctgcggaccggaaattatgatgaaggttctgtgtaagaaatgcaaatcccttggggttcaggcgccggtttatgtatccatggaaaaccgtatggcctgtggaattggagcatgtctggtgtgtacttgcaagacttccgccggtaataagagagcgtgcaaagatggtccggtcatgttgggaagtgaggtgtttggaaatgagtaagagattagaagtgaactatgcaggcgtgcattttaagaatccggttgcgctggcatccggcacctgtggattcggaaaagagatgagtgaatattttgatattcagagattgggaggactctgttccaaagggctgacattacatccgagaggcggcaacgatgggatccgtgtctgggagacgccaagtggtgtaatgaacagcgtagggcttgaaaatccgggagtaaaacatttcatcgaatgtgatgccaagcggatgaacgcacttgatttagttaacatagtaaaccttgggggacattctatggaagactacttagaggcagtggaactgctgaacggatgtgagttggatcttctcgaactgaatatctcctgtcctaatgtaaaggccggagggatgaattttggggtgaagacagagcttgcccgccaggtggtccgggaaatccggaaggtatgtaaacataagcttgtaatcaagctttcacctaacgcagaggatatcgtggcactggccagggcctgtgaggaagagggcgcggacggcgtatctcttaccaacacgtttcttgcgatggcgattgatatcaaacggggcaagcctgtgtttgacaatgtgtatgccgggctttccggtcctgcaatcaagcctatcgccctgcgcatggtacaccaggttgcacatgctgttaagattccggttatgggaatcggtggtattgcaacatggcaggatgcaatcgaatttattatggcgggagcgacaacacttcaggtaggggcagcttctttcatgaatccatccatatccatggagatcatagatggaatggaagattatcttgaaaagaatcgtatttccaatatttcagaaatcagagggattctgtgacagggagggagaacaaaatgtcaaaagagacagagtatcgtatcgaacatgattctattggtgaaaagcagataccaaaggacgcgtattatggggtgcagacccttcgcgctgcagagaattttttcatcaccggtctgaagatgcatccggagtttatcaatagctttgcccaaatcaaaaaggcggcggccatcactaattttgaggtggggagactggacaaaaagcgtgctgacgccattgtgcaggcatgtgatgaaatcatgtcgggcaagctgcatgatgagtttattgttgaccccatccagggcggcgctggaacttccctcaatatgaatgccaatgaggtgattgccaaccgggctatcgaaattctgggaggggaaaagggcgattattccgtggtgaatccaaatgatcatgtaaattatgggcagtccaccaatgatgtgttcccctcctgtggaaagcttaccacactgaagctgctttacaaggctcaggcagagctggaacggctgtaccatgcgctgatggagaagtcggaagaatttaaccatgtcattaagatgggacggactcagctccaggatgcggttcccatccggctgggacaggagttccatgcctatgctacagccatacgcagggatattaaccgctttgacagggccaaggaggagatgaggcatctgaatctgggcgggactgccattgggaccggattaaatgcggatgtaaagtatttacagcgggttgttaagaatatttctttgatttccggtttggagctgattcaggcatatgacttaattgacgcaacccagaatctggacggttatgtagcctgttcaggaatcgccaagtcttgcgcggtgaatttatctaagatgtgcaatgatttaaggcttatgtcgtcaggccccagaaccgggctgggagaaattaacctgcctgcaaagcagaacggctcctccattatgccagggaaggtcaatccggtcattccggaggtggtgaaccaggtagcgttccatgtcattggcaatgacatgaccgtagccatggcagcagaggcggggcagctggagctgaacgcatttgaaccgatcattttttataaattgttccagtcggttgagaccattgcctgtgcggtacatacgctggttgacaactgtatctccggaattacggcaaatgaacagcattgcaaagatatggtggaaaacagtgtgggaatcatcacggcaatctgtccttatgtgggttatgaaaaggctgccaatgtggcaaaggaggccattcggacaggcaagtccgtaagggaactggtaatcagggacaagcttctgacaaaggagcagctggacattatactgaaccctgtttccatgacggaaccgggaatttcagggattgaagcgatgaataagatgggagggctttaagatggattacaggctggagcatgattccatgggagagattgaagttccgtccgaccggtactggggcgctcagacacagcgaagcttccagaattttaagataggtattgaaaaaatcccaatggaggtcatacgggcattcgcaattcttaaaaaatccgcggctgttgccaataaccggctgggaaaactggatgaacagcgcctgaaatcgatcagccaggtatgtgacgagattctgtccgggaaactggacgatcatttccctctgtctgtctggcagacaggaagcggcacccaatccaacatgaatgtgaatgaggtgattgctaaccggggcaatgagattgcaggtgagaagcttttacatcccaacgatcatgtaaacatgtcccagagctccaatgacacatttccaacagctatgcatatagcggcggtaatggaggttcaggaaaagctgctgccctccatcgatcagcttatcaggactttcctgcgtctggagaaggaaaatgaagggattataaagagtgggaggacccatctgcaggatgcgactcccatacagttctcacaggagataagcggctggaggagcatgctggaaaaaaacagagaaatggtggtttcttctctgacaggattaaaggagcttgccttaggaggcacagccgtagggactggcttaaatgcccctaaaggatttgacacggcggcggcagcggcagtgtctgagctgaccggaattgattttaggactgcggataataagttccattccctgaccagcaaggacgcgaccgtatttgcccacggcgcgttaaaggccctggcggccaatatgatgaaaattgccaatgatgtgcgctggctgtccagcgggccacggtgcggactgggggagattcagatacctgaaaatgagccaggcagttccattatgcctggtaaggtaaatcccacccaatgtgagtccgttactatggtagcagtgcaggtcatgggcaatgactgcgccatcggttttgcggcctcccagggaaattttgaactgaatgtattcatgcctgtaatcatttataattttttacagtccgtgcgtctgctgtctgattccctgcgttcctttgaactgcattgtgccagaggaatcaaggcaaaccgcaggaaaatgaatgagaaccttaaccgttcccttatgctggtgacagcattagccccctatataggctatgatcacgcggcgcagacagctaagaaggcttataaagaggatatttctttaaaggaagcatgtatttccctgggctttctgacaggggaggagtttgacagggtatttcatccggagcagatggtttcatcacaatagcagatgattataccatgtggaggaatacgacataccagaagggagaaaaagatggacattaatcaggaatcattgaatcttcactataagcttcagggcaagatcgaggtgatatcccggaaaaagatagagacaaaggaagacttatccctgttatacacaccgggagttgcacaaccgtgccgggagattgccgcagactataataagtcctttgagcttaccagaagaaataacctggtagctgtcattacagatggaagcgcagtcctgggactgggagatatcggtccggcggcaggcatgccggtgatggagggaaaatgcgctctgtttaaggagtttgctgatgtagatgcatttcccatctgtattaattcaaaggatgtagataccattgtgcagaccatttatctgatttcacagagctttggcggaatcaatcttgaagatatagccgcgcccagatgctttgaagtagaaaagcggttaaaggaattgtgtgatattccggtgttccatgatgatcagcatggaacagccattgtggctgccgctgctatgctgaatgccctgaaaataaccgggaaggaaatggggcagatgcggattgtggttaatggagccggcgcagcaggcattgcgattggaaagctgttaatcagtatgggattcggcaatatcatcatgtgcgatatcaacgggattatctgcgagggggatgcgggactgaatccggggcaggaggagatttctcatgtaagcaacaggaataaggagcatggaagcctggcagatgcaatgaaaggggcggatgcatttgtaggcgtttcgcgacccggcctggtaacaaaggaaatggtaggtactatgaataagggaatcgtctttgctatggctaatcctgtgccggaaatcatgccggaggaggcgctaaagggaggcgcggcagtggtaggcaccggtcgctcggattttccgaaccagattaacaatgtgcttgtatttccgggaattttcaaaggcgcgctgtctgtcagagcaagggagattacagaggcgatgaagcgtgaggctgcttatgcaatcgcaaaaatgataccggaggaagagttgagagctgattatatcattccctcgccccttaacaggcaggtggcagatgtggtggccagggccgtggcggaaacagcgaagagggaaggaatagcaaggtctgcgctattgacaatttctttatagagcggtgctggaaacggcccacgcattgaggcagcatgggcgcccagcagggcggtggcggccatatcaggttatcagcgcctttcgcacgcgccgctacgccacccgcgcttctttgttttgcggatgaccaaaacgcatttcacggcctcatcctccggcattatatcacgaatactgatacaggagccgccggttttccgatagatgcaccacgaatactggtgtttgtatcctgtgcaggatggccctcttcctttacctcgttacagttcacaggtcaatgtcatttagttaacgctttgcaatattatggttagattcttaatgaagggtgtctaaccatatttttcccttttttcataaaaacagttgacatacaccacaaaatgtgcggccgctctcgctactgattgactttaataggtagcgagagcggcccttggattagaatcataaattcattctaattcaaggaggtacacacaatgttccatcaaaaaattaaacaatgcttttcccattccgtccatcttgtttcatccgtaatctccgaatttacctattcggacaccgatctgacaaggaacaggaagttccccgccgataagcttatcactttccttgtttcccaaggctcctccagcacaaaaaatgaattgctggacttcttcgacatggatccacagtcgccaactgcttcggcactcaaccagcaacgcgcaaagcttagcccggatgccctggaagctgtatttcggcattttaaccattttgcttctttttatgaccaaaaaaagctacgctaccgctttcttgctgcagatggctccacctttacctttttcagtaaacctgctttcgccccagaagagtatcatgtctctgaaggacattcaataaagggcttttacagtatgcatctgaatgctttttacgacttacagaagcacacttattccgatgcgctgatccagccgatccatcagaaagatgaatttagtgctttctgtgaaatggtcgaccgccacgatttactgactggtacaaaagatgtttttatcggtgacaggggctattgttcttacaacaacatggcacatgtgaaggaaaaaggccagtattttttatttcgcaccaaagatatccattccaaaggacttgttggaaattttgagtttccagatgcagactcctttgatattcaggtaaatgtaactctggttcgcagtcataaaaagaagatatcgattaaagaaggttattacaaacgctttgtggatgcggctgcatcgtttgattacgttgcatatggttccttggatacctacgatttatcttttagaatcgtacggtttccgatatcggatgattcttatgaatgcatcgtcactaatctgccttcagatgaattcccgtcggaacaaataaaacttctatactatgccagatgggccattgaggggtctttccgtaagctgaaatatacggtcggattgagtaacttccatgcctacaaacatagaaaagggaaacacgaaatatgaatacaaagtaaatttcagtatggctgctcatatttgtagagtctttctccgtccgaacacagagaaagactccatagatgtgatgtccctgctgacaaaagagctgattccgatacggaatgatcgacagtatccacgactccaaacggcacacttccgaaaacctcgatattttatatatcgagcagcataagtaacagtttcatcaatatctataatacccttttttgaagcagatgtaaatctgcttgtttgccttgcggtaaaatatttacaaaactacttctgataaataatccctatatccttctcttcaatctatccgtttggaacgtcagatctctattttaaaaaaacattctttcttttacaaaaagttaactaaatgacattgacctgtgaactgtaactttacctcaccgttttaaaataattggaaagcgcatccttgacacggtatatatcatagtatatactaaggatataaaggaggtgtctcactatgatgactgcaaaattattcgaaaatggccggagccaggctgtaaggctgccaaaggaataccgcttccagggggatgaggtcatggtcaataaaataggcgacgtggtcctcttaatgccgaaaggggataaatggtccggattcctaagcgctttgaacctgttttccgatgatttcatggaagaaggacgtggagagacggccgggcaggagcgggaagaactatgaaatatatgatggatacgaatatctgcatttatgccattaaaaacaaaccggaatcagtaatcagaaaaatcctgtcacagaatcccgaagacctgtgcatttctgtggtgacttatgcagaactcatgcatggcgtggagaaaagccaggctgtagaaaagaaccgcattgcgatgtcgctgtttctctccgcaattacagttttggattttgatggcgaggcagcggaagtctatggacagataagagcggaactggagaggaaaggtacgccaatcggtcccatggacctgttaatcgcagggcacgctaggtcacaaggcctgatacttgtgacaaacaataccagggagtttgcccgcgtcacggggctgcggatagaagactggacataatttcccggcaattcatccctaatatccgtctaccgcctcacataatttctacgacacatatagaaaaacgagcaaaggaaggatataaaatggatattaaacaatttaagaaagggcagagcgcctatatgctcaaggaaaaccacgtatatagcaaaccgcctgatagccatgacaaaactccaaatatttagtatttatgcgggtttgtgaggcatggcaaacctctttatcactccaaatttatagaaacaaccagctccctttgatataatgaagttgtcaaaatcaattcacacaaaaggagctgattgttatctaccgttaagaaattttgaaagacatccgtctttttacctctcagcctgttgccaaattttatgactcgttattcctccggcttgatttatcttttgttcaggagttccctcatacgggaagaaaaggcttttctaatcatgccatgatttgttccttcattgttatgaaatgtgaaggtttttccatggtttccgaccttgtcgattatctgaacaacaaccttctcattgctcattactgcggttttgatatatcccgtccactgccttcctattggacttttgaccgcttccttaaaaactttgacaatggcctgcttcccatttgcggctttctggcgggcggcggcacgtcaagatatatatatatggagttttttaagaacctccccggagcgggggagcggtcagcctgtgacctgctccacctccgggatgggtttgagattgaaatgaatttcgatagaaatttgtcttgttttgtcgctgtctatggtttcatggacaacgatttctttaatcaggcggtttagggtggctgcgtccagctccttccggctttcctccaccttcgcctttaactctgcctgttccttctgcgtcttttccatcagcagattgaagttcgcttcgctgatgcgtccgtcaaccgtgtcctcatacagccgcaaaaccgtcttttccagaacgtcaatccgttccccgtctttcgcaagggaacgctccaacgcttcccgctggcctttctgctcggcttcgcaagtgtcggacagcttaccggcaacggcttccccgtctatcagggcggctctggcgcactcccggattttgttcagcacaaagcggtaaagggtttcgtattcaatgcggtgctgtgtgcaatggttcttgccgtaggcgttgtacgtcttacaggaataaatctgcttcaggtgtttgtcgttggtgtagcggatagtcaaggatttcccgcactcgccgcattttaacagccccgcaaacaggctgcattccccggtctgccttggacgctgccgggatttcagcttgcgccctagggtgtcaaaactcttgcggtcgataagcggctcatgctggttttccacaacaatccattcctccggcttcttttcccgatagtgccgattttgaagcggtattccttcttttgggaagcgattgcgccggtgtagacgggattcagtctgtctggcggttgggttattttatacttttttaattttctgttgttttggttgtcaaaggggagaaaagcccgcagttacgggattttccccggcaactggctcggcaacgggatagcaacgggggcggcaacggactgtggtttcgtccatcggatagcagtatatttcgcatgaaccggcttgtttgcttcaaagttcccgatatggaaaagcagccggtcaatctcttttgcacgtttttccatcggtctgatttcctcacggatggaaacagcctgtgcgctggtttcatccagataggcgtcaaggctctccacggtggaaatctctttctgccgcaggaagtcaagggcttccataaccttgttgaaatccccaacagttccttttaacttccctttggaagtccagccggtgcgttcctcgctccgcatatccagataccgggaaagaagttccgggatggtcggttccttggcctgtttccggcagcgccgccttttttcttcaggtcagacagacagctctttaggttccgtaccatctgccggatagactgcataagtccattagcagctttgatgtcccggttcaggttgccgatgttggtctgtatgccttgtttctccaactggctgaccgcaggccccatgtgaacggtggggattttatcaatcccctgtcgggcaaaggaacgaaggtcaaggcgttccgggctgccgatggcttccagatagcggttggttgtgtccgcccatccctgccgccagatttccccgtacttctgggcgttccagtccacggtgtcctccttgtggcttttccatctgcctgacgcaagccggatacgctcgccgttctcatcaaggtcgtacaccttccggctcttggggagccacttgctctgttcgtccatcgcccgcatagtaagcaggatatgggcgtgtgggttcccgtccaccttgtcatggatggcaaaatcggcaagcatgcctttggaaacgaaaaactcccggcagtagtcccggataaggtcggcgtactgttccttagggagttccctcggaatggcaagcacgaacctccgggcaagttgggagttccattgtttctctatggcttcggcggcgttccacaaggtattgcggtcggcgtactctggcggggcatggggcggcagcatgatttcagtgtggacaatctcgcttttatgggaatggtatttctgcttctggtcgtattcggagaacagccgttccccgctttggtaggcggcggaagcaacggctgactggcgtttgcttcgctgaatgattttcacatcaaagtgtgggcattgcaagaaaaaaacctcctttctcccggcattggggcaaagaaaaagcaggaaaccgtttttctgatttcctgctcggtggtgccgccggtgggcggctggtattcagttttgaaagttcggggcaagatggcccgatgatggacaactcgataaactgggattgaacaaaatcgctgcgcgatggcctgccaaggctgtggcatagcgattttctgttttctataacaaaacagtggaaagcaagtcctaaaagtagtattgttaagtcaccacaaccaaacaatcaaacaggatcgaccttcccactgcctatgaaaagaataccacccttccgcttggttggcaagcggttttatgacccaaatgcacctccatataaagcagtgtttttgatgactactgattttatatggaggattttattatgtatgaaaaatatttagaacagcttgaggaagccggaaaaatccgtaacctcaaagaacgttccatcaactgttataaaaactatgtctcttactttctgaaatatcagggcaagtgtcctgaagaacttacctgtcaggatgtcaggacttttctgcttgcaaaaaaagaagaaggattaaaagccacaactctgaacctttataattcagctatccgttttttctatcggaatgtcctgcatatcctttgggatgatatcacagttccacgtatgatccaagaacacaggcttccgactgtactgactgctgatgaaattgaccgtttgttagacgctgttgacgatatcaaatataaggctatgcttgcagtcatgtattcttccggcatgcgggtttctgaagtaattcatcttcattatgatgacatttcccgctcaaatatgcagatccatgtccgggatacgaagaacaggatggaccgctataccattctgtctaagcgttgtctggatatccttacacaatactggtttgaaaaaggacgtccacgtggcatcctgtttcctaataaatttaccggcaattacctgacagtcagtactctggagcaagtaatgcggcgggcagtagctgatgctgaacttccaaaggaagcgtccccgcactgtctccgccatagctttgcaactcatctgatggagcagggcgtagaacggcaaaatattcaggcactgcttgggcaccgtgacccaaaatccacggaagtttatcttcatgtcagcaacaaatctctcatgggaatccaaagcccctttgacaggaaagaaggtgctgattatgaataagcccaccgtccaggatattttccggtgtttttatccggcatacctcgaaaagtatttcccttctccggaacagacaaaagttgcccggaacatcctgaactgcaaaacgggagcttatggtgcaaacgtcagcgtatgtgaagactgtggtgcagttcatatccactacaactcctgccgtaatcgttgctgtcccatgtgtcaggctgttccaaaggaaatgtggatggatgcacgcagggaggatgtgcttgatgcaccttatttccacctggtgtttacagttcctgatattctgaacccagtcatttacaataatcagaaactgttatatgacaccctgtatcatgcggcttctgctacaatccgtgaactgactgctgactcaaagcaccttggcgcttctgttggttacatctgcatcctgcatacatggggaactgaaatgaactttcatccacatatccatacaatactgcttggcggtggtctgacaccgaaaaacgagtggaaagacaatggtacggggttttttcttcccatatgggctatctctaaagtcttccgcgggaaatatatggatgagctgaaaaatctctggaatacagatcagcttgagttccatggaagtgcagaaaaatatcgtaatcattatgctttcaaagagctgatggattcctgttatgatacagaatggattccttgctgcaagaaaacttttaacggtgcacagtctgtgattgattaccttggaaaatatacccataggattgccatcagcaatcaccgtatcatccgtatggacgatgaaaatgttactttttctgtcaaggattaccggaataaaggacaatggaaagaactgacactttccggtgttgaatttatacggcgttttctgatgcatgtaccacccaaacgttttgtcaggattcggcattacggacttctttgtacccgcagcaaacacaggaagctcactttatgccggaatctccttggatgccaaaagtatctttcgaagctccggaataaggagatgccggaaatactgaaacagctttatgggataaacatttgtgtatgtaaatcctgcggtggtcatcttggaaaaccacagcttcgaataccacaaagatgttaaaatcttattctttcatacgttttctgaagcctcaaagtttgaggttttgttgtcgtacctatttatctggaaacacttgatttctgtagcttctgcatgggaaatcctgtataatcatgggtaagaaaaaagattgaaagtccataagcaacagctacccagacgctcactttgttcaattaggtcaaatcgaaaatggtgtaaacgaaggggcagttcactggaatgccaaaactgctttttcgtttaccccatcatcgattctaacctaaagaatttgtcggaacgatagtatgtaatctttttaaagcgggatttaatcagtaatcgttgctctatttatcgttgattttcagttcaaatatatctggacgcgcataatgtccaatcgcgtcatgttccattttgcaggcggcaggcaaactcatgtcaagctccgcatagatgatggtttctttatcccagattggttctgtcagataatgtccatacgggtcaatgatgcaacttcctcctctgcacacaagttctggtagttgagatactatatcttcatataggtcagaagggtatgagttgcgtctgataatcatatcagcgttaacgaagaaacatttgccttcgattgcgatgtgctgaatggtggcctgccactctggattgtcattggtatttggcgaaatgtaaattgtgattcccttttggtagagtgctacgcgagcaagtggcatatagctttcccaacaaatcatactgccaatcggtccccatggtgttgttgtaatagggaaataatccttgttagcatccccccacacaacacgttcggagcctgtcggctttaatttcctgtgtatcttgtacgatccatccggctcaaaaatgacattgctgttgtaaagtgttccattaacggcatctctctcggaaaagccaaggctgatatatactcccgttttctttgccgcctctgcaagctgccggaactccatctctccggcaacaacggaggcgtcgtaatatcgtttccagtcctttcgcccattctcatttcgtttccctatactgaaaccaaaattcatcccaacagggtatccaggaataaaaagttcaggaaaaacgattatatccggcttttgtattgcggcctcgttaatacattgaagtgcctttttaagtgatgcgcttttattaaacattacaggttctgtctgcaccaatgcgattttacaaatgttttttatatctttcatactaacagattcactcctcctacaaattctggtttatcgctgacactattatacagctttaacttgctaaatggaatacgctttctgaaagattttcgggcggcaaagccacaatggggtagctggcgaagccagcgcaggggaagggcagcttcccctgtgatgattggaacagattgaaaatctgcggaaatcatctgctgtccgcaggacgcccccggcagggcgcaatgcaccacttccctaagtggtgtataattgcgccctatccgagttctgggatagggcgcattatccgagattttcaattatccgaggaaattcataaaaagtcccattcgtaaaggcttttaagaagatttcctcggataatgttttacccgcatggtacattaaagtcatcaaacaaaaaggaggctttaaccataaccatgaatcaacagacaaatgaaaacacacctacactgtgcaggtatcaggaactgaatccggagatggatgctttcctgagaacgtatcttgaagatgggtggcgcagggggcttcgggaaagctctatccatctgcatgataagattgggcactacttcttatccgccatggctgaaacaggctgtatgaaaccgcaggaaatgaatgcccggaatatagggactgcctgcctgaccatcagtagcaagtggtatctttcacacatccggacattcctccggtatgcttaccagtccggctataccgacagggattacagcggtatcgtccctcggtttaaaaggccgcagccatacccctcggtttacaccacagaggaaatcctgaaaattgagagcagcataaaccaggattctccacatgggaagcgtgattatgcagccctgctccttgcgacacggctggggatccggagcggtgatatttcatccatgacacttgaatgtctgtactttgacaggaacctgattcggattacacagcataaaaccggaatcgccatggaatttcccatggttcccgatgtaaaaaccgcattggagcggtatctgcgggaagaacgtgccggtcatggcagtccatatgtgttcctccgcattgtccctccatacagccatatctccgtgcaggcaatcactaagattgtaaggactgccatagcggcagccgggattgacccggacgggcgcaaacagggagcacatgcttttcgttcatcccttgcaagctccatggtcaatgacaacatcccttatgaagcagtaagaaaaacccttgggcatacagaccagaacgccatccgctcctatgccagacttgatctggaacagctccgtgggtatgcactcccggtcatggaggcgacgggcatctttgccgcattcctggaggggaggtggggcctgtcatgaaagaatttcaatccattttcaaaaatgagcttgcagaatatattgaaatcagccaagggacaatcagcaaggataccttgcggaatacgcacagagtattgctttcattcgattcactgctggcaggagaaaatgccaaagagatatcggaaacgtttatcaaccaatggatcagggcgctccatcaggcaaacgccccaaaaacggtcagcgacaaggtgagttatctccgcaaattcctgcggtatctccggtatgagggatactgtgttttcatgcctgactgccccaaaacatcagacagctatgtcccgtacatcttttcagacgatgagatacagacgcttctggaaggtgctgacaaatgggctgacaggcatccagacccgaaaacccgccagacggacatggagttctgtatgctgctgcggatgctccttgggtgcgggttccggttgggcgagccgcttgccgccaaagtaaaggatgtgaatttccatgccgggaccatcctgatccgccatgcaaaaaatgacaagcagcgtgccgtcccgatggaccagaccctgacgcagattctggaaaggtactgcattgcaatgggcatcaggacagacccggaaagctacctgttcccggcatccagaaacgagggggctgccgtcagcaaagggacttttgatttacggttcaggaaccttttgcgggaaaccggcctgtatgtacctgggaaaccccattccagaggccagtgcctccactgcttccgccattatttcgccattcattcctttgcgcgggctgagaagaatgggcgtccggcagacgattccgtgccatttttatctgtctatcttgggcaccatgacatggacgagacggagaaatacctgaaattcagcggggacatgttccctgaatattcggggctgtttgaggagtatgccgtcggcgtattcacggaggtggcctgtgaggaaaaataaactccctgaattcatgcttctcctggagcagttttttacggaatacatgccgctctcatcagggctttcccagaacaccgtcaggtcatacaaacattctttccggcttctgttccagtatgtttaccagacgaaaaagaaagaggctggtgagatccggttccgggatctggattttgagacagttgatgggttcctgaaatggattgagacagaacggggctgctccgtgtctacaaggaacctccggctgtcggcactttcctcttttgccgcttatgcacagaacagaaattttgaagctgcgacggtgtttgccaacgcagtcaggagaattcctgtaaaaaagcaatccgtacagccaaggattgccttttcccttgatgaggtgtcagccctgctccggctccctgatcccgaaaaacgtctgggactgcgtgaccaggttcttttaaacctgatgtatgccagcggtgcgagggcgcaggaaatctgcgacctgaaagtcagggacttttttgtggagaaaaacctttataagctgacggtcacaggaaaagggaacaaggcacgccggattgtgcttgccaaacccagtggaattctcctgaaacggtatctggaggaaacaggccatgccggacagttggaagcctatatcttttccagccagacacatccacagatgactatttcctgcattgaggagatttacaaaaaatatatcgccatcgcaagggcagagcatccgggaatgtttttggagaaaagctataccccgcataccatgaggcacacaaccgccacacatatgttagaggccggtgttccgattgtggcaatcaaaaatttcctcggacattcctcgatttccacaacggaacggtacgctgaactttcacagggagcagtgaacaggcatatccgggattggaacgagaaatggttttcccatcaaaaggaaactcctgctaatcagaaaaaggagaatccgttgcccgacttcctgaaatagcgcttacattatccgaggaaatcttcttgaaagcctttacgaatgggactttttatgaatttcctcggataattgaaaatctcggataatgcgccctctttcagaggggtagttccacgggctgcggctctggaagcaatcatggccgttcccggcctgcgtcctgtcctccaaaatagccgtttccggcgaacactttttccataagctgacgggtactgtcctgatggaacagcagcttcaatccgggtaagcgcctttgcctgatggataaggcgtttttcctcttgctccgtccaacgcagctttttctccgttttctctatctcctgaaagagtaagaaaaaaggaatgacgctgcagcagaagcaaaggtttacaggctggctttttctggctccaggggttctgctgattgtggtcttaagttttgtacctgccattcaggcacttttgatatcgtttaaaacagggacgggaaccaacatgagatggtgcgggtttggcaactatatcaggatctttcaggatcaggtgtttatccagtccatcaagaactgttttttatatctgattatccaggttcctattatgctggttcttggaatggcttttgcctccctgttaaataatccgaaactgcggtttataggatttttcagaacagccattttcctgccttgtgccacatccctggtagcatatgccattatattccgatccctgtttgccaatgacgggtttgtgaacatggtgctggtaaagcagggaattttggagaccggttataactttttgtctcaccccgccagcgccaggattgtgattattattgcgctgatttggcggtggaccgggtacaatatggtgttttatcttgccgggcttcagaacattgagtattctgtttatgaagcggccaagattgacggagccaacatgtttcagacattttttaagattaacgcgcctctgttaaagcctaccatacttctgactttaattacttccaccaatggtacgcttcagctgtttgacgagtcggtgaatctgaccatgggaggaccggctaatgccagcattaccatgtctcattacatttttaacagagcttttcagggcgttccaaactttggttatacatcggcaatgtcttttgtgatactgattatggtggcatttcttgccttggttcaaatgaaagcaggtgacggccgtgactaaaaagagtacaatattttttatgtatggatttctgaacattgcttctctgatctcgatttttccgttggtgtggatggtgatcgcggctaccaatcggagcgtggatgtggttgcgggaaagctgactataggaggaaatttgtttcggaattatttaaaccttacttcttctcagaatgtgtggaagtttttcttcaactccgcaaaatacgcggttttaactacagtactgtcccttttcgtgtgttctttggccggatatgcttttgagatctaccatgacaagtggaaagacaggctttttacggtgattcttatgaccatgatgctgccgtttgtggcccttatggtgccgctgtttcaaatgttttccaaggcgaggcttttgaattccacgttgggatttcttctgccttctctgtctgcgcctttgctgattatgatgtttcggcaggcagctaagtcttttcccggggagattattgaggcggccagaattgacggtttaagtgagattcagatttttttccgcatgtttgttcctatgatgaagtcaacctatgcggcggcggttacgatttcgtttatgaatgcctggaataattatctgtggcccaaggtgattatgaccaagggaagttcccagaccatgcccatgatgatttccagcctgactgcagggtatactacggattatgggatgttgatgctggcggtgttaatcaccacgttacctacggctgttgtgttctttgtactgcagaaaaactttgcagaaggaattactggcgctattaagtaataagggagtttttattatgatgaaacagggaaaagtcctctatggaggggattataatccagagcagtggctggaacgtccggatattctggagaaggatattgaatacatgaaagcggcgggaatcaacacggtgactgtcggcatgtttgcctggtcagtgctggagcctgaggaggggaggtatgagttcggctggctggagaggattgtggacaatctgtaccaaaatgggatttccgtgattatgggaactccttccggggcaagacctaagtggctggcggacgcttatgaggaggtgctgcgggtgcgagaggacggggtgcggtttttgtttggaaaacggcataatcattgttatacctcgcctgtgtaccgggaaaaggtaagagctatcgataaagccctggcagagcgttttcataagcatccggctgtaatcttatggcatatttccaatgagtatgagggacaaccggcctgttattgtgcactgtgcaaggcagcctttcaagagtggcttcagagaagatataagaccattgaggagttaaatgagaaatggtgtacaacgttctggagccacagatatcagtctttccaacaggtggaaccgccgtcttctataggagaacaggagcttcacggcctgacgctggactggaaacggtttatcacggagcagacggcggatttcgcggagaatgaaatcagggctttaaaggaagggggaattacccaacccattaccaccaatctaatgtatgattaccagaatcttattggtccggtgtggttgatgagaatgaccggtgtttcctgggtaagactccttatgggcttacagatatgcttgggcttaggcgcaaagagattgacgggctttatgatggggaatcgaatgttatggtgccggagaacaagtggaaaaaggattccgggaaaaatggtgaaccaggaagtaagggacaaaagggatatgcgtgtgcaaacctctacgagattctggatgtgtggaacgcccggacgctacttgtgtacggggaggacttttatggcggaacgccggctgtgacaaagaactgctatggacgggggacggtttgctatgtggcggcggacggagaacagaggttgtatgacgatttgcttaaggaactggctgatacggccggggtggttcccattgtggctggggagattcctgagagtgtggaagtgtgttccagggagtccggggatacggagtatgtgtttgttctattataggaaagtccttgctgaaataaagttatgtaaactaatgattctgccaaaggagggtatagaaaacagacggtgatttagaacaggtcgatatagaacccttcttcccatccatcatcgtcgaggtcgtcatcttcagttaaaaagtaatgcatatccaataaatcagaatcggtcatatttctgaccagtttgggtgtcattccttctggaggatttttgatgtatttttgtctgagttcatccacatatctttgattcatttgcaactgcctcccatctgtaataaatgtagtatgaagcagatgggagagaaagtcaagcagagcgggaccggggataaaggccatgccttatccttgtccttttgtataattcatccagaggaacccgttcatgtttatggtacagctctagaaagaccatttcatgtctgcagtttgggcattgcagggggtcgtaccccatggtaagaaggaaaagcttacgccaggtgttgaaatcgaggagaatcctgtgtttggattttgggactgctttatggagctgattgtcaatctcccggtgtctggcataaagcccatagtaccgggtcatcttgaagtttttttcaggtatatgcagaatgagcagcttaatgaaatcaatggcgggaagagtcttttttacaaaagagttgtcttcatgcttattgtaatggaaagtcaccatctccccatcgtaggaatcaatcctggaaagagcaatgacagggcggccaagataacggctgacatatttaataatggattttgggtcgcaaagattgggcttggcataaacgtagaatccatttctgtccctatggtaaacggcggctttcatctttttaaaagagggaccgatgcgtttttccagtttatttaacaaaacagtctgaaaggatttacggaggtaggaataattgaaatatgtgaccttgcgccagacaccatcatcagaaaacccgccttcggtaaggagacagtggatgtgtggattccaaccgagagggcgaccgaaggtatgaaggacacagataaacccagggacaaagtttttggatttgttcagggagaaaaaatattctttgatgacatcagaaacagcctcgaaaaggcagttaagcagagtgcggtcttcgaggaaaaagcggcggagggattcgtcaatggtgaagacgagatggcgatgggtacactgtattaatttaaaagacatagcggtagacctgtcattggaatacttagcgccgcaggaggggcaaaacttggagtggcagcggaaaggaacgaacttgaggttaccgcaatggggacagccatacatggcgccaccataagaaggatccccgcagttaatgaccttatcaatgttttccatgacgacaggtctgggttttatatcgtattcaatgatttcgtaatagtctctgagcatcttctgaatcacattcatgagattattatggaataaaatgacgcaaaaaacaagccctaattcccctcatgaatgaggggctaggggagttgaggtgccgaaggcactttcttgagaattttcacagtgaggcagtggagataaaggaaatgaagctttatggagaggagattttgggtgagaagggggaaatgctggagccttttggaactttgattttgaaaagaaaaattgaggataggaagatgtaaaacagatgttaaaaggcctgaaaatatgttgcgggaaacatgttttcaggttttttatattatagggtgcgcccagctaagggcttgaaatttagtgggtgagagtcccacggtgtaaggtacaagctataccgcatcaagcgagtcttgggtggacagcagcgatgttgcctgctaagcgtagacagcgggattgcagggcatagccgtatatagcttcgatattaaaatgaaattgggaaggcagaagtgctcctatacactgaaagcaacacagctgtagtcgttaagagcgagaatgcagctgcttccccggggttttaaggctggtcatgtaatcaaggattttaagtcaactggggaggtctgccaggctccgggcaggttgcgtaagcccggtatacggaacaacggtagaaaggagaaccgtaaatggccggcagaagtcggatggccgaatagtacacagcaaaaaaaagcggtggaagtcgagagagacctgtcctcgcaggtcagccatgcaaagtcatatcaaagaggaaacataatctgtacgcagagacaggagaaattatggaaacgaaattggcgagaatatcacagttgtcaagcgaacatccggaaatggtatttacgtccatagggcatctgattaataaagagttactgaaagaatgccacaaggagatggatggaaagaaagcggtaggaattgatggaattaccaaagaggactacgaagtaaatttggaagaaaacttagatgaattaatcaggaaaatgaagaagaaggcatacaagcccaaaccggcaaaacgggtggaaataccaaaagaaaatggaaagacccgcccgctcagtatatcctgctatgaggataagttagtacaggaagcgctaaggcgaatactggaagcagtgttcgagccccatttctacgaagaaatgatgggattccgcccaggaaggaactgccacatggcattaaggagactgaatgggatgctggaaagggaaaagacgaattgggtgctggacgcagacattaaagggtttttcgaccatttagaccatgaatggatagtaaagttcatagaatcgcggataaaagacccgaccattatcagactggtaagacggatgctgaaagcgggaatcatgagagatttcagatatgaggagacagaagaaggggcaggccaaggctcggactgctccccggtcatagccaatatatatatgcactatgtgctgatatggtggttcagggagaaagtacagccagtgatgagaggatatgcggggctggtagtctatgcggatgattttgtgggatgcttccaatataaatcagatgcagaaatattttatgaacacttaaagcgcagaatgaagtactttggactagaattggaggaaagcaagacaaggttgattgaatttggccgattcgcagaaagtaaccggaaagaccggggaaaagggaggccggagacgttcacattcctgggattcacgcattactgttcgcatggcaggacgggaaagttcagagtaaagaggaaaaccagtaagaaaaagcttgcaaagaaaagcagggaaataaacgccatgataagagacatgaggtttctggagataaacaggatagtaaagaaactaaatgaagtactgactggttattatcattattacggaattactgacaattcaagaagcctgaactcattcaataatgtggtatggtttaggttattctactggctgaacagaagaagtcagagaaggagctatacgaaggaaggatataaggaactaatgagacagttcccgcttgtgcggccacgtatttatgtcagtatatacggataactgtagatgtattagctttgcagggagccggatgcgggaaagctgcatgtccggttctgagaggggtaagccctgtaaggggcttacctacttaccaaagtccttgctgaaataaagttatgtaaactaatgattctgccaaaggagggtatagaaaacagacggtgatttagaacaggtcgatatagaacccttcttcccatccatcatcgtcgaggtcgtcatcttcagttaaaaagtaatgcatatccaataaatcagaatcggtcatatttctgaccagtttgggtgtcattccttctggaggatttttgatgtatttttgtctgagttcatccacatatctttgattcatttgcaactgcctcccatctgtaataaatgtagtatgaagcagatgggagagaaagtcaagcagagcgggaccggggataaaggccatgccttatccttgtccttttgtataattcatccagaggaacccgttcatgtttatggtacagctctagaaagaccatttcatgtctgcagtttgggcattgcagggggtcgtaccccatggtaagaaggaaaagcttacgccaggtgttgaaatcgaggagaatcctgtgtttggattttgggactgctttatggagctgattgtcaatctcccggtgtctggcataaagcccatagtaccgggtcatcttgaagtttttttcaggtatatgcagaatgagcagcttaatgaaatcaatggcgggaagagtcttttttacaaaagagttgtcttcatgcttattgtaatggaaagtcaccatctccccatcgtaggaatcaatcctggaaagagcaatgacagggcggccaagataacggctgacataattaataatggattctgggtcgcaaagattgggcttggcataaacgtagaatccatttctgtccctatggtaaacggcggctttcatctttttaaaagagggaccgatgcgtttttccagtttatttaacaaaacagtctgaaaggatttacggaggtaggaataattgaaatatgtgaccttgcgccagacaccatcatcagaaaacccgccttcggtaaggagacagtggatgtgtggattccaaccgggagggcgaccgaaggtatgaaggacacagataaacccagggacaaagtttttggatttgttcagggagaaaaaatattctttgatgacatcagaaacagcctcgaaaaggcagttaagcagagtgcggtcttcgaggaaaaagcggcggagggattcgtcaatggtgaagacgagatggcgatgggtacactgtattaatttaaaagacatagcggtagacctgtcattggaatacttagcgccgcaggaggggcaaaacttggagtggcagcggaaaggaacgaacttgaggttaccgcaatggggacagccatacatggcgccaccataagaaggatccccgcagttaatgaccttatcaatgttttccatgacgacaggtctgggttttatatcgtattcaatgatttcgtaatagtctctgagcatcttctgaatcacattcatgagattattatggaataaaatgacgcaaaaaacaagccctaattcccctcatgaatgaggggctaggggagttgaggtgccgaaggcactttcttgttggataatctaatttggaaaatgggtaaacggtcagagagaagcggtaggagagaacgaaaaacaccttgccacgcacacgaaaataccgtataattattcagaatgatgttttatacggaatatggaaacagtttcgtttcatctatcaaaaaagcccgtaaaatcaaagaaaaaagaggcagtcatgagaaaattagcgttaagtgatgagatattattatcggtacagcagccggcccgctacattggcggcgaggtcaacatgcgtgtaaaggatccaaagaaagcggatatccgcttcgccatgtgctttcccgacgtctacgaaatcggaatgtcccatctgggcattcagattctgtattccatgttcaacaacagggaggacatctactgcgagcgcgtttattccccgtggacggacctggaccccatactcagggagaataagataccgctctttaccctggaaacccaggagccggtaaagaattttgattttctgggaattactcttcagtacgagatgtgctataccaacgtacttcagattctggatctttcacagattccgcttcatacctgtgacagaacggagaatgaccccattgtcattgggggagggccctgcgcttacaatccggagccgctggccgatttttttgatctgttttatatcggagagggtgaaaccgtatattttgagctgatggaccgctacaaggaaaataaaaaggccggcggcaccagaaagcagttcttggaaagggcggcagagataccgggcatctatgtgccggctttttatgatgtgacctataagaaagacgggaccattgaatgttttcggccaaataatgaacatgccatgccggtggttacaaaacaaatcgtaacggacattgacagtgtgggctatatcgaaaaaccgctggtgccattcatcaaagtgacccaggacagggtggtgctggagattcagcgcggctgtatccgcggctgccggttctgccaggccggggatgtgtacaggcccctcagagagcacagcctggaatatctgaagcactatgcttacggcatgctgaggagcacggggcatgaggagatatccctaagctccttaagctccagcgattacagccagttagagggcctggtcaatttccttattgacgaattcaagggaaagggcgtgaacatatccctgccttccctgcgtatcgacgcattttcactggacgtcatgagcaaggtgcaggatgtgaaaaagagcagcctgacctttgcgccggaggcgggatcccagaggctgcgggacgtcatcaacaagggactgaccgaagaagtgattctgaagggagccgccgatgcctttgagtcagggtggaaccgggtgaagctgtattttatgctgggtcttcccacggagaccgtggaggatatggagggaatcgcgctgctttctgaaaagattgcggaagcatattatgatattcccaaggaccagagaaatggaaaagtacagattgtggccagctcctccttctttgtgccgaagcccttcacgccgtttcagtgggccaggatgtgtacaaaggaagaattcattgagagagccaatattgtccgcggcaagttccgtgagatgaagaatttcaagagccttaaatataactggcatgaggcagagcttaccgtgctggaaggagtgctggccagaggcgaccgcagggtcggcgcggtgatagaagaggcctaccgcacaggggccatctatgactcctggtctgagtattttaaaaatgatgtgtggatgcgggcgtttgagacctgcggcgtggatatcgggttttataccaccagggagagaagtctggacgaggtgttcccttgggactttattgatgcaggcgtgtcaaaggaattcctgattcgtgagtggaaccatgccgtgaaggaagaagtgacgcctaactgccgtcagagatgttcaggctgcggagccagtgattttggctgcggcgtctgttatgaaaccgtaaaggaataggacaaatgaaaattcgaattaaattcagaaaatatggaacaatgaaattcatcggtcatctggacgttatgcgttacttccagaaggccatacgcagggcggatgtggatgtctgttacagcgggggattttccccacaccagatcatgtcctttgcggcgcccctgggagtgggaattaccagcaacggggaatatgtggacatagaggcggcctctaccaaagattcggaaaccatgaagagatgtctgaatgaggtgatgtcagagggctttgagatcgtaagctaccggattctgccggatgatgcggccaatgccatgtccatagtcggggccggggattataccctggcctttaggccgggatacgagcctgaggacatggataaggaacagtggtttcaggggcttattgccttttttgagcgtcccagcgtcatggtgacaaagaaaaccaagcgcggggaaaagaagatggacttaaagcccctggtttatgggctgagcatctgtcccgagggggatggtgaaatggaagggccccgcctgtttatgaaaatatccacgggcagcgctgccaatgtgaaaccggaacaggtgttggatgcgtattacgggttcctggggaaggagcgcccgccctttgcctttatggtgcagcgggaagaagtatatacagacagggcctctgaggctgagaaggaagccggtatacactcctttatctctctggaacagctgggtgaggaaatcagataatggacaaattagtagtgacccggcggggggataaggtctgtacggccgtggtatcagatggaaaggtaagccagcttatgctggagccggataccgcggactccctgttgggcaatatctatattggcaaagtacagaaggtggtaagcaatatcaatgccgcctttattgacataggaccgggatgcaccggatactacagcctgcaggagcgctggaagccggaacggcttaagaccggcgatgagctggtggtgcaggtcagcaaggatgctgtaaagacaaaggccccggtggttacggaacgtctttcctttacagggcggtactgtgtgctgactgtgggaaagaccggaatcggtttttctgcgaaaatccgtgatgcctcctataaggcaaggcttcactcccttctggaatgtgacctggccgggacggaggacctgggcgttattgtacggaccaacgcggttacggtggaagaccgcattgtgcgggaggaactggctgagctgatggggacatggcaaagactttcggcggacgctgcatgccgggtctgctacagctgcctttacagggcgctgccgggatatatagcggccatacgggattccttttgcgggaccctggaagaaattattacagatgttcctgagtatcacagggagctgggggcgtacctggaaatgtaccagaaggaagacgcggaccgtctgaccctttatgaagatagcctgctgccacttagcaagctttacagtctggagactgcttttgaaaaggcgctggggaagaatgtatggcttaagtccgggggatatctggtcatagagcccacagaagccatgacggtcattgatgtgaatacaggaaagtattcaggcaggaaaaacatgcaggacaccatatgcaggataaatatggaagccgcggatgagattggacggcagctgaggctgcggaacctttccggcatcatcattgtggattttattgatatggaaagggaagaggacaggaaggcccttcttgcccatttgggagatgttgtttcaaaagacccggtaaagaccacggtggtggacatgacggctttgaacctggtggagctcaccagaaagaaaatgagaaggccgctccacgaacaggtctgaatatgacaatacacaggggataaaggggaagaaatatgaaaatcattattgtaggctgcggtaaggtgggaaccacactggcagagcagctgaacagggaaaaccacgatattacactgattgactgcgacagcgaagcgctccaatccatttcagacagcacggatgtcatgagcgttaccggaaacggggccgtgtaccaggtgcagatggaggcgggaatcaaggaagcggatttgctgattgccaccaccaattcagacgagcttaacatgctctgctgtttgattgcaaagaaagcaggcaattgccataccattgcccgtatccgcaatcccgagtactcagcggaaatcaactatatcagggaagaactgaacctttctctggccatcaatccggagctggccgcagccagggagattgccaggctgcttcgttttcccaatgccatcaagattgagctgtttgccaagggtaggattgagcttctcaaattcctgattcccaaggattccattctggaccggatgaaggtaatggatgtggtgagccggttaaagagcaatgtactgatttgcgccgtggagcgcggggataatgtagtgatacctgacggcaactttgagatgagaggcggagataagatatcctttattgcgccccatgcagactgtgctgatttcttccgcaaagcaggaattgagaacaacacggttaattccgccatgtttgtgggcggaggaaagctgaccgtgtatctggccaaggctctggctgataccaagataaaaattaagattattgaacaggatgaggagcggtgcaggatcttaagtgagattcttcctcatgcaatgatcatacacggggatggttcggaccagaagctgcttttagaagaaggcatccgtcagacagaagcatttgcctccctcactggttttgatgaggaaaatattctgctgtccttatatgcggccagccagtccggggccaagctgatcaccaaggttaacaaaatagcctttgaaaatgttatcaactccctgaacctggggagcgtcatatatcccaagatgctgacggccgacatcatcctgcagtatgtgagggccatgcagaactccatgggcagcaacatagagacactgtataaaatcgtggccgacaaggccgaggcgctggaattcagagtgaggggggattcgcctgtgctggggattccgctggagaagctgaggaccaggaataacctgctggtggcatgcatcaaccgcaacggccgcattatcatgccacgaggcaaggataccctggaggctggggacacggtcatcattgtgaccacccatacagggcttaatgatttgaaggatatcttaatataaaggcgggcgggatatgaatcgaagtataatcatttatatgctgggctggatcatgaatatggaagccattttcatgactctgcctgtcattacggctgttgtctacagggaaagcatcggcttcatctatctgggcgttgcggttgtctgcggtctgctgggttttttgtgcaccaggaagaagccatgcacaaagatgttttttgcaagggaaggatttgtgacggtttccctggggtggattgtattgagctttttcgggtgtataccctttgtcataagcggagagattccccatatcattgatgccatgtttgaaatcgtatcgggctttaccaccacaggctccagtattatccccaaggtggaggatatgtcccatgccaccctgatgtggagaagcttttcccactggattggcggtatgggaattctggtgttcatcctggcgattctgcccatggcaggggattacaacatgcatattatgagggcggagagcccgggcccttccgtgggaaagctggtgcctaaaatccgaattactgcaaaactgctgtactccatatatttttgcatgaccattgtcatgatgatccttttgctgcttggaaaaatgcctttattcgacagcatatgcatgagctttggagcagccggtacaggaggctttgcctgccgtaattcaggacaggcggattacacggtgtaccagcaggctgtcatcaccatttttatgctgctttttggcgtgaatttcaatgtgtactacctgctgctcatacgcaggcccaaggatgcgggacggtgtgaggagctgaggggatatctggccgtggtggccattgctatcctgctcatcaccatcaatatccggaatctgtttccgtccctgtttatggcattccatcaggcggcgttccaggtttcctccatcattaccacaacaggatactccaccattgactacaacagctggccggagttttccaagacaatcctgctgctcatcatgtttatcggcgcgtgcgccggcagtacgggcggtggcatgaaggtttcccgtgtcatgattgcgtttaaggaaataaaaaaggagatggcatcggttattcatccccgcagcgtgaaggtgctgaagtttgagggaaagcccctggagcataatatcctcaggtcccttaatgcttatattattgtttatttcataatattcggcatatccatcctgattgtgagtctggacaattatgatttcatgacatccttctcggctgtggccgccaacttaaacaacatcggtcccggcatgtccgtggtgggtccgtcctctaactattccatgatgtcctatttgtccaagaccgtgctcatattcgatatgctggccggaaggctggagcttttccccatgctggtgctcctgtctccgggaacatggaaacgcagttgagatttgtgaaatgcaagtgaaaaaacagtgacttttattgacgaatccgggcctctggggtatgatttccataagaaatccatgggttacgctttttgcgcatatggaaatcatcgtgaaggaggggacggattggtaagattcaaaaaaggcacaaagggcgccggcgccctgatactggcactctccctggcttcgtcatatccggccgtatcatgggccggtgagacggaggatacagagaggataatggagacaggggagagaaagcgggctgagtcttcggaagatgcagtcgtctatggaccgggaagctatgttatcggtgaggacattttgccgggagaatatgcggtttttacggaggacacatcggagcagaacgcctattccacctgcaccattaccttatataaggatgatacggatgctcggcgcatcggaaccttccagtttcagcaccacggactgatttccctatataagggacagcatctggtaatcacgaaaggatacgcggtggaagcggaccgggcgggcatcaccccggggaccaccggcatgtacaaggcgggccgggatatggaaccggggacataccgcatcacgccccttacctccggcagcgggtattacgccctgtataatgatgtgagatattattatgactatatagatgaatacgctgcattgtttgagccggttacggtcaatatcgcaaacgggcagtatctggagctttttgatgccgggtcaatagagcgggtgccggactgaatccggcctataaaccacgaccgttttttcgtttggggacgcctcctctgaactgttacataagtccatcataaaaaagtccatcataaaagcctgcaaagatgataaaatataaataaaaaaatatggaaattccggttgacatcggaaaaggaaaatgatatgatataccagtatgccgcacagcggggttgtaagagtctgccagtattcccaggaaaaaagcaggccaccgaagctggcgagtaatgataataggaggtgcctttcatgtacgcgattatagcaacaggcggaaagcagtacaaggtagcagaaggcgatgtcattaaggtagagagactgggcgcaggcgcaggcgagaccgtaacatttgaccaggtgctggcagtaaataacggcgagctgcagattggatgcccaaccgtttccggtgcaactgttacagcaacagttgagaaggaaggtaaggctaaaaaggtgatcgtttacaagtataagagaaaaaccggctatcacaagaagaacggccacagacagctctatacccaggtaaagattgaaaaaatcaacgcttaattgtaaatgatatgattaaagcaaccgtattcaagaattccacggattcaggcaatgctgtatacacagggattgtgatggagggacatgccgggtatgccggggagggtgaggatatcatctgcgcggcggtttcagccctggctcttaacttttttaattcagtggaggcatttacggaagatggatttgaaggcggggcgggagagagcggttcatttgaattccgtttcacttcagagataagtcctgaatcaaaactcctgatgaactctcttattctaggacttcagaatattgagagggattatgggaaatcatatattaacgtgaagtttaaggaggtgtaacacatgttaaagatgaaccttcagttattcgctcataagaaaggtgttggttctaccaagaacggtagagactccgaggccaagagacttggcgctaagagagccgacggacagttcgtactggctggcaacattctgtacagacagcgcggaacccacattcatcctggcaacaacgtaggcaggggtggcgatgataccttatttgctttagtagacggagttgttaagtttgaaagaaagggcagagacagaaagcaggtttctgtatacccaagggcaatcaacgaataatttcgaagggctccatacttagcgtatggggctctttttcacaccacaggaggtactgtgtatgtttgccgatagcgcaaaaatatttattaaatccggtaagggcggagacggccacgtgtccttcagacgcgaactgtatgttcccaacggcggtcctgacggaggtgacggcggccgtggaggcgacgtcattttccaggtagacaaaggaaaaaacaccctggtagatttccggcatgtgcgtaagtatgttgcaaaggatggccgggaaggcggaaagaaacgctgccatggagcggatgcggatgacctgattgtgaaggtgccggagggaaccgtgcttaaagatttcgagacgggaaaggtcattgccgacatgtcgggtgacaaccagagggaagtcatcttaaggggaggcaggggcggtcttgggaatatgcattttgcaacatcgaccatgcaggtgcccaagtacgcgcagccggggcagcccggcgcggagctgtgggtgcagttggagcttaaggtcattgcggacgtgggcctggtgggctttcccaatgtgggaaaatccacgctgctgtctgttgtcagcaacgcaaagcctgagatagcaaattaccatttcaccaccctgaatccccatctgggcgtagtggacctgggagacggggccggctttgtcatggctgatatccccggtctgattgagggagcttccgagggcattggcctgggacatgcgtttttaaagcatattgagcgcacaaaggttctggtccatgtggtggacggcgcttctgtggagggcagggatcctctggaggacattaagaccattaaccgggaactggaagcctataatccggagcttttaaagcgtcctcaggtgattgccgccaacaagatggacgcggtgtatgcagaagaagacacggagatcatacttgacgagctgagaaacgaattcgagccaaagggaatcaaggtgttccccatatccgctgtcagcagacagggagtgaaagagctcctgtaccatatcaatgacctgcttaaggcggtggataacgcgccggttgtgtttgcgaaggagttcgaggtccggtatcagggcgacaggaacctgccttacacggtgaccagggcggatgacggcgcttatgtggtggaaggtcccagaatcgataagatgctcgggtacaccaatctggattctgagaagggatttgatttcttccagaagttccttaagaatacgggagttctggacgacctggagaaggccggcatagaggaaggcgatacggtccgcatgtatgggctggagtttgattattacaaatagaaggagttattatgacaagcaagcaaagagcctatttaaagggcctggccatgaacatcgatcctgtattccagattggtaaatccagccttacgccggagcttacccaggccgtggacgaggccctggaagcaagggagctgattaaggtgacggtgctcaagaattgtctggacgagggcggttccatcgcggatgtccttgcagagcgcacacactcacaggtggtccaggtcatcggcaggaaaatcgttctttaccgtcctgccaaagaggaaaagaaacgtaagatcgtgctgccggagaaatagacggacaggcatccggtaaaggtatgtgaagaagggatttgtttggcaaaaataggaatattgggcgggacctttgaccccatccacaatggccacctgcggctgggcagggaagcttatgagcagtttgggctggatgcagtctggttcatgcccacaggaaatccaccccacaaaaaagatcataaaatcactgagggagagatgcgtgagcatatggttaaactggccattgcagatactccctatttcctgtattcggattttgaactgaggcgcagggggaatacctacaccgcccagaccctgtctctcctgcgtgaggaatacagggaggatacgttctacttcatcataggggcggattccctgtatcagattgaacagtggttccgcccggagctggtcatgaagctggcggtgcttctggtggccggacgtgcctatcatgatgaccaccagccctttgacaggcagattgaatatctgactgccagatatggggcaaagatttaccccatccgctgccgtgagatggatgtgtcctcggaagagataagggcatccgtgtccgacggacattccatccatggatttgtgccggatgcagtggaagaatatattaaggaccatggactgtacgggggctgcgtcaagaacccggtcctggccggcaaaggagaatgaatgtatggaaaaccaatgcagccagattatgttatacaggaaaaaccttaagagaaagctggcgcccatgcgctatgagcattctctcagcgtgtcatacacctgcatgaatcttgccatgcgttacggctgcgacctggacaaagcggaactggccggactgctgcatgactgcgggaagcggtattcggatgatatcatattgaaaaaatgcttgaaacatggtctggaagtaacggacgcggagtacagggccctgcctgtgcttcacgcaaaatacggggcatggctggcagagcacaagtatcagattacggaccgggaaatcctggatgccatcggctgccacaccacaggcaggccggagatgaccactctggataaaatcctctatatagcggattatatagaacccaggcgctacaaggccgagaatctgccaaagataaggcggttggcctatgaggacctggatgagaccatgtatgccatattggcaggaaccttggattatctggaaaaaaagggaggaagcattgaccccttgacggctcaggcatatgaatattttaaaaaagtgaaaggagaacgcgatgaactcaaaggaaatggtgaaactggcatatcaggctctcagcgataaaaaaggagaggacattaaaatcattgacatccagtctgtatcagttctggcagattattttataatcgctgacggcagcaaccccaatcaggtgcaggccatggctgataatgtggaagaaatcctggaaaaggccggctgtgagtgcaagcagattgagggataccagaatgcaaactggattctgatggattacagggatgtgattgtacacatcttctgcagggaggacaggttgttctatgatttggaacgaatctggagagacggaaagacatttgtggatgtaaacgagctgtaacgtgtaagaacaggtaataaatgaaatggaatgagagacggatatacgaggtctggaatgatgggactttcgtatatccgaaggacatagagatgaatcctaaaaacaggaactgcggtgtcaggataacaatacaccagcggttcctgtttgcgcagttgcggtagtatgtgtaatagcggtatataacagtgacagatccggcatatattatgccgatacatcgttatgcctggtatatcatgatgcaaaagactcatcatccccgtcgctgcatcatacgcaccaggcctatgaccttgcccagaatctctacggtctccgttatgatgggctccatggcatcgttctctggctggaggcggtaatgtccgttctccttataaaaacgcttaaccgtggctgaatcatccaccagcgccacaacaatctccccgttggccgcagtgggacactgctccacaatcagcttgtcgccgggcaggattccggcgccaatcatgctttctcccttaacctttaacatgaacgtctccgcgttgggaagaatctctgccgggaatgggaaatagtcctcaatccgctcctctgcaagaataggttctccggctgctacggttccgacgagagggatattcaccatctctctgcggttaaaattaaaggtgtcatctaaaatctcaatggtcctgggtttggtggggtcacgccgtatgtagcccttttcctccagggcggacagatgggagtgaacggaagaggtggactttaaatgtactgcctcgcaaatctcccgcacagccggcggatatcccttctgtaaaatagtctctttgatgtattctaaaatctcctgctgcttagaagtaattttatcctgtgccataatcaacctcctgcgttttctatatttatagtaacatatgttcggtaaaaatgcaaacctttgttcgattttttgccaggaacacttgacaaacatttgttctggtagtatagtatgaatatacaaaagaacagacgttctgtattgcgcgcaagaaggaaccgccccagggaggttaccatatgagaaagagaaggttagcagctacatgttttacggttttactgtttgtatccattataatgggacgtactatgtttacttccatggccaaggaggaggggagcaggaccaccccttattataagagcgtccgtattcaggaaggagacagtctttgggggattgcccgtcaatacagggaaggcagttccatgagtatggaagagtatgtgaatcagctcaggcagatgaacggccttaagaaggacaccatccaaacaggacagtatctgactgtagtatattttgagtaaaccggattagtttccgtacatataatatgatagtatgaaatacacttaaagcctttggggatatccggccagctccaaaggtttttatcttttcatggatttacttaatattccggttacatttatgtctgaaaatttcaaaaagttccaaattatataatttttcaacgttttattgtacaaaataatacaaatttctttcttgatgttaagataccatgaaaatgagcatcatacgccgtgatataatatacaaattgcagaatgagatcttcttggatttgtaacattttcttttttataacatttatattatcaatttataaataatatgtatttgaaattattaaataaggtgactataataggcaaaagcaaacaagaagagaaagggggttgttgagtatgaacggtttagtggaatcactgatggaagagcttaactgcaaagtggtgttcaccataccgctgtttggcggtattgatgtgatggaatccgtggctgtgacatggatcatcatggcgattatgatggtagcctccctgatactggtccatggcctgaaggtgaggaacataagcaagaaacaggctgccctggaaagcggcatgtcctttatctatgatttctttgaagggcttctgggaaaggaaggaaaggattatataccatatctgattacagtggtgatatacataggaattgccaatatgattggtctacttggcttcaagtcaccaaccaaggatttgaatgtgaccgtttccctggctgttatgagtatcgtactggtggaagtggccggcatccgtaagaagggtgtcaagggatggataaaaagctttgcagagcctattgccatcatagcgccaatcaatgtgctggagctgtttatacggccattgtccctgtgcatgcggttgttcggcaacgtgctgggcgccattgttgtcatggcactcatcaagcatttgctgccgttaattgtgccgctgccattcagcttctattttgatatatttgatggagtgatacaggcatatgtgtttgtgttcctcacatcattatatataaaagaagccattgaggattaagtttgcggccttatggaaaaagaaaatattgagagaaaaaggagagtcttattatgacaggattaatcgcattaggagcaggtgttgcagttgttacaggtattggagcaggtattggtatcggcttggctacttccaaggcagtggacgctattgcaagacagcctgaggcagacggcaagattacaaaggcacttctgttaggatgcgccctcgctgaggcaaccgccatttacggctttgttatcggccttttaatcattctgttcttaaaataatttatagcaggaaggcgacttaatatgttaaatttgaacatttggaatgtagccttgacggttatcaaccttctggttttatatctgttcatgaagcacttcctgattggtccggtgcgcaggatactggatgagaggaagcagatgattgagcacgacctggacgaggcaaagaacagggaaacagaagcgcgtcagatgaaggagcagtatcaggcttccatcggcagtgcagacgaagaagcttcaaaaatcatcgaggaggccagaaacagggctgccgcagagtatgaaaaggttctggcccaggccagggcagacgctgccaggaagatggaagaggcagacaggaccattgccctggaacgcgagaaggccatgaatgacttgaaggccggcgtggccggtttggccatgacagctgctgccaagctgatcagcgagcagagcgcaccggatggggacaggaacctatacaaccgctttttagcagaatcaggtgaaggaaatgactgagacagccaggacttatgccattgttctatatgagctgggcataccggaagatatggtcagggaagccgtaaagctgcttaaggagaatccggaacttccggaggtccttaatagcccggtggttcccctgaaaagtaagcatgccgttattgagaaggtgttcagggaaccggaattttccgcactgatggtacgtttcttaaaaaaggcttgtgatgcgggatgcatcggacagacagaggagattgcagcggcccgtgacgcctatgccaggaaggcggcaggtgttatggatgccgagcttcactatgttaccatgccgggtgcggcccagattacaggaatgaaacagtttctgtgcaggaaatataagaaaaaagatgtgaacatccgattggtgaaccagccggacctggtgggcggttttgtccttaaggccggggatacagaatatgactacagcctgaaggggcagctggtaaggctgcgccgggctgtggtaagataggagtcttgatatgagcacaatcagttcccaggaaatcatctccattattaagagtgagattgagaattttgacatgcatgccggacaggaacaggaaactggttctgtcatctgggtaggagacggcatagcaatcgtatacggcattgaacatgccgtgtacggggaaatcgttatatttgaaaatggtgttaagggaatggtccaggatatccgcaagaatgagattggctgtatccttttcggaaaggatacaggagtgggccagggcaccaaggtagtccgcaccaggaaaagagcaggcgtgcctgtgggaagcggattcttaggaagggtggtcaacgctctgggagagcccattgacggactgggccctgtaaaggaagaagattacctcccggtggaggaggaagctcccggcattgtggacagaaagtccgtgggagttcccatggagacaggcatccttgccattgattccatgttccccattggccgcggccagagggaattaatcataggagaccggcagacaggtaagacctccattgccatggatactatactgaaccagaagggcaaggatgtggtctgcatctatgtcgccattggccagaaggcatccaccgtggcaaagctggtttccacccttaagaagaacgatgccatggactacaccatcgtcatgtcgtccacggccagtgaggcagcgcctcttcagtacatagctccctatgccgggactgccatggctgaatatttcatgcatcagggaaaggacgttctgattgtctacgatgacctgtccaagcatgcggtggcttacagggcgttgtccctgctgttagagcgttctccgggccgcgaggcttatccgggcgacgtattctatcttcattcgcgtcttctggaacgctccagcagactttgtgatgaaaagggaggcggctccattacagcccttcccatcattgagacacaggccggggatgtgtcggcatatattcccaccaatgttatctctattacagacggacagattttcctggaaagcgacctgttcttttccggcatgagaccggctgtgaacgtgggactttccgtgtcacgtgtaggcggcgcagcccagacaaaggccatgaagaaggcatcaggaagcatccgtatcgacctggcgcagtaccgggagatggaggtgttcacccagttcagttctgacctggatgaggccaccaaggagcagctggcttacggcaaacggcttatggagctgcttaagcagcctctgggaaggcccctcagcctgcatgaacaggtcattaccctctgcgcggcgacccacaaggtcatgctttccgttgaggtttcggatattaaggaattccagatgaacatgctggcctggtttgatgaaaagcatccggagattgggaaagaaatcgaggaaaccaaggtcctgaacgatgacctgataaaacgcatcgtggatgcggcaaaccagtataagacaaaacagtataaggcatccgtctgaccaggaagaaggagttaatatggcaaatgcaagagaaatcctcagccgtatgaaaagcgtccaggatacccggaagattaccaatgccatgtacctgatttcctccaccaagcttaagaagagtaagaaactgttggaggaaacagagccttacttctatacccttcaggatttgatacgccgtatcctgcgtcatatgccggatgtagagcatttttacttcaatcccaggaaggaaattaaggaggaggacaggataaagggactgatagtcataaccggcgataagggactggcaggcgcttacaaccataacgtgctgaagatggcccaggagtggatggaacagagtaagaaccaccggctttatgtggtgggggaactgggacgccattattttgaggccagacacatccaggtggaggagcagttccattacacggtacagaaccccaccatgcaccgcgcccgtctgatttcctccactatattggaggattacgaggaaggacgtctggatgaggtctggattatatatacgcagatgattaacagcatgcagatggaggcggagatgacagcgctccttccccttaaacgggaggatttcagcaatatcgtcatccctgcggatatcatccaggaggagattcagatggtaccttcccccagcgctgtcatggaccatgtggtccccaactatgtgaccggattcatattcggcgccctggtggagtccttctgcagtgagcagaacgccaggatgatggcgatgcagtctgccagcgataatgccaacgcaatcctgaacgacttatccatagagtataaccgtgtaaggcaggcggccattacccaggaaattacagaagtaatcagcggtgccaaggcacagaaaaagaaacattcgtaaattcgtaaatataaaaggaggcagccatgagcaagggaaaaatcatacaggtcatgggacctgtagttgacgtggcttttgaggatgacggacttccccatatcaaggatgccctggtggtggataatcagggtaagaagtgcgtcatggaagtggcccagcatgtaggcggcaatgtggtgcgctgcatcatgctggcatccagcgacggcctgtgcaaggatatggaagtggagcccacaggcgccggcattcaggtgcctgtaggcgagaagaccctgggacgtctcttcaacgtattgggcgagaccattgacggaggagagagcctggaaggcgaggataaatgggtaatccacagggacccgccttcttttgaggaccagagccctgttgtggagatgttagagaccggtattaaggtaattgatttgctggccccctatgccaagggaggaaagataggcctctttggcggtgcaggcgtgggcaagaccgtgctgatacaggagctgataaccaatatagcaacggaacacggcggatattccattttcacgggtgtgggagagcgttcccgtgagggaaatgacctgtggaccgagatgagggagtccggggtgctggaaaagacagccctggtatttggacagatgaatgaaccaccgggggcccgtatgcgcgtggccgagacaggactgaccatggccgagtatttcagggatgtggagcatcagaacgtgcttctgttcatcgataatatattccgttttgtccaggcaggttccgaggtatccgccctgctgggacgtatgccttcggcggtgggatatcagcccaccctggccactgaggtaggcgaattacaggagaggattgcttccaccaagaacggttccgtaacatcggtccaggctgtgtacgtgcctgctgatgatttgacggacccggcgcccgccaccacatttgcgcatctggatgccaccacggtattgtccagaaagattgtggagcagggcatttatccggctgtagaccctctggaatccacctcccgtatcctggaagaggatgtggtgggtaaggagcactatgaggtggctaacaaagtacagcagatgcttcagaagtataaggagctgcaggatatcattgccattctgggcatggaggagctgtctgaggaggataagctgaccgtaaaccgggccagaaaaattcagaggttcttatcccagccattccatgtggcggaaaactttaccggtgtgcctggaaaatatgtgcctgtaaaagaaaccatccgcggattcaaggccatcattgacggcgagatggacgggtaccctgaggcggcatttttcaatgtaggtaccattgacgaggttgcggagaaggccaagaccctggagcatcatgaggcttaaccaggactgtctgccgcggaaaggagccgggatatgtctgcattttggctgaaaattgtagccagcgaccacgtattttataatgggcattgctcgtatctggtggtgccagcaccagacggtgagatgggcattatgcctcaccatgaggccatgattctggctgtccaggagggtaacctccgctttaaggtgccggaggaaacaaaatggcatcaggccattgtgggtcgcggaatcctgcaggtggccaataaccgtgtgaccatgattgtggataccgcggaaaggcctgaggatattgacgaggtcagggccagggaggcgctggagcgcgcacaagagcagctgcgccagaaacagagcctgagggaatttaagatgtcccaggcgtccatggcaagggcgcttaccaggctgaagggaagccatctgaaggaattgaagtgatggaaaccaagtgaaggaagctatgatagaagagaattataaaagtttggctgcgggatggaaacatcctacagccattttgagttttgtatgagaaaattacagaagtccatgacaatgggattgtccttgccaagaggagaacacatgaggataatctgacggcggcatacctgatccttgatgggaagcagctttaccggggagtggggagacatgggcccccattcgccgcccaacggtccccaggagtactggggccagaatccgatgccgagcccggccgcgatcaggttcctgacagactctgtggtatcactttcaaaaatcacgttggggacaaaatccgcctctgaaaagtaactgttgcatatctggcggatgggcctggaaccggccaggcatatgtatcccgcgtttcttgtatcagccaggttaatggaatccttatcaccataaggagaatgggtgggaacggccagatacaggtcttcctccagcataaccatgtaatcctcataatcggtattttttaagtcggaccgcaccgcagacacgcataaatcatagtcggcatggttctcggcctggtacagctggaagttcacatccggccgcagggccctgtaagcaataatccggttggtaatcagagtggaggcagccagaagctttaagtggatagtgtggctggacatgtattggtcggctctcagttcaccgggaatccggtccagggcgcttacaatgggaatcagccgcttttgaagaagacgtccggcttcatttagttccacacttctgcttttcctctcaaagagcggtacacccagctctgcttccagccggtggatggcctgagagagggctggctgggctatctgaagatgttcggccgcctttgtcatgtgctggtattcagcggctgtcaaaaaatatcgtaattgcagtaattccatacgtcacctcggagatacgattttgcgaacaggggattcctgtccgggtatccgattattatataacagaattaaaaaaaatgcatccaaaatttaaatgaggaaaaaactcgcaataaatttggacagagaaaaaaactcaatattgcaggaacgaaaaaaactcaagacaaacaggaaattttctctgtttcagctcttgtaatttcgtgttcggtctgataatattatatataagttagttttaactaactaaaaatatttcggaagaatattttgaaaataataattctgagacagccggaggtaatacgtgagcaaagaaaccttacatctaatgttgaagctgaatccggaagagttggatacccaggtggcattgcagtgcgcgcccttacttacaggtatgaagatatcaaatttgctgacagtggggcgttccaaaagggcggcggttctggaattgtttaaggacacggccgtgtcctgctgtattttatatgaatcatctgagaaaaccacatttcttctttatatcaggcaggcgctggaagcgtatctggcccggccggaggtgaagggtcttatggaacggtttggttacaggggatgggatttggaggagattttgagtcttgtatccatcaaatatgaggagcacatggaagaccgtgccggatttccgcatgagataggtttgctgctgggctatcctgcaaaggatgtgacaggatttatcgaaaataacggaaagaatttcctctatataggatactggaaggtttattcggatcttcctgagtgcaagcgtatatttcaggcatacagccacgctcgtgagcacataatccatatgatttcccgcggtatgaagattgatgcaatcttaaggatacacaatctgaagcaatataaatcaatgacaatataaggaggacatacgacatgaatcagattatggtagttttctggtcgcagacaggcaacacggaggctatggccagcgcggtggcggaaggcatcagggaggcaggaaaggatgctctggtaacagaggtctcccatatatcggcagatgcacttaaggatgcaggcgtttttgccctgggatgcccggctatgggagcagaggttctggaagagagcgagatggagccgtttgtgacagaggtggaggcatttgcttccggtaagcatataggtctctttggttcctgcggatggggtgatggagagtggatgcgcgactggcaggcacgtatggctcatgcgggagctgatgtggtgggtggcgaaggcgttattgcccaggagagtccggatgaagatgcattgaatcagtgcaggaagctgggaaaggccctggcagccgcggaagcataagaagcataccatgtcttttggcagacctttcggtttgcctttttttttgcgctatggtataattcttaaggaaagtatcagattcagagcgacaaaaaaatgaacagcttatgcaaaagataaactgctctgaatgtgattctttccaattgtaccaagtcgcggaactttagccataggctgtatggggatagtatttccccagggaagcttaaaatagtggattatggtggtctgcaatgcagaagcaggacgattttagctgtatcccatatttttgggtatgcttcgcagacctcccgatggcaggtcttaaaaaatatataggaaagcagcctgtcaggaagaaggaacatgacaccttcccagctgtttcatggctgtatgaccacattcaggacacacacagatatcgaaattccagactgcttttaaaagctctgccagggacattccggcgtaacgctgcttgaaacgctgtccattctgaagcttaaagataaccttcagattcttatatttcatccgattgttcagaaaaccataatagcgtattttctgaaagccggaaggcagcacatgcatcaggtaacggcgtataaactccgtgttgccaagagtaatctgacgttttggttcacccggcttttttccacgggcagagaatgttaccgtatcttccgtaacagaaaggatcctgctgttagagatggcgattttgtggatgtagcgtccaaggtattcaatgacattgccgaagccgttgaaggttttcttgatgtaggggcaccagtccatttcataaagcttatttttaaattccttccagtggtaagaattacgcaggttttcacaggaggatgaaaagttaagggagccgctttcataaagggagacaaggtgtgccatatatttccccttaaacttatcccgcaggacctccgtacggataaaaaacttagatgaggatttacggatttttccatctccggtaagcccgccgccggaaacaatgcagtgcatatgtacatggtaatccagctcctgattccaagtatgaagtacttggataatcccgggtgttgccccgagccacttcttatcagcagataattccagaagtgtttcggcgcagcatctgtgaagaagtccatacagaagcttctggttgcagtaaatgaggggatttaattcatgtggaagtgtaaacactacatgaaaatagggtgaatcaatgacctcagcactgcgtttatctacccagatttctttcttcacagcctgacagttggggcagttgcggttgcggcaggaattattgtggacttccacatgcccacagtcggtacactgacttaagttgacaccaagccttccggatttgcagtttaagatggctcgggcggctttgcgttggacatccgactgatagtgccccggtgctgagaaagcttcataggactgctcaaatatctgcctgattttgtaatcactcatggtattcacctgccaatcggtcaaaagggctgacggcattgcggatggcattaccggaaagatggacataaatagtggtggaagacaaagatttatgtcccataagcgcttttatggtaagcaggtcggttccgttttcatacagatgggtaccaaaagcatgacgaaaggaatgacaggtaagcctgcgttcccatccgagcctgtcctcatgggcatggatgtgtcttgaaaggaagaatgtgtcgatgggtctgtcctcgccactttgctttggaaaaagaaagccttttggtctgccgtattcaaaccagtagcgtgtcagcaggtcaagtgccgctttagaaagaatggcatagcggtcattcctgtttttggagtgtgtgatgtgaagccgcatgtttttgcggtcaacatcctcgtaacgcagacggcatacttcaccgatacgaagccctgaggaatacatgagtgtaaccatagtcttctgctttaaatcaggtatggaagaaataaactgccatgtttcctgtttcgagggaacatagggaaggtactcgtcaaacttacgcatgggaagctgtgtgtcatcccatgttttgtgaagaacatacatggtgaaaaagcgcagttgtgaaatggcacagttgatggtgcggtcagaaaggtctctggatttctgtagccatttgatgtagtcacgaagttcatcccaggaaacatcttctggcgatttgtgaagaacatttgcgaggtaatccagatacgcccggatgtaagtacagtaatttttaagggtatggtcggtaagaccgcgaagggaaatcatttccctgaaagaatttaaatatttgtccatagtaaaatctcctttgaaatgcaataaaaacagtagttacatttcaaaaagaggtggtggacgagtaaaaaaataagatatatagttgttgagtttagaaatccatgataacataagcatagcagttcttaaagttatgaagttgtttggtgtggtaacttaacaatacatcataaatttaaaaactgctattttttataaaaaaagtggtggttttatgtaccttgggctagccgtcgcactagcgacttggtacaatgatggaatggtatcaggaattggggggatgcgttttgtatcccggacctgctttttccatattggaggatgagctgacggatgccgaaaaagcggaaatcgcccggaatgcataccaggcggaccaataaaagggtggtgggggatgattaggcggttacattccggctggaaccatgatataatttaaatacctaaaattttctaaaaggattggcacaggagcctgaaacaggactgtgctccgggacggaggaattaaatgaatcaatttgtcacggaacagctcatctacgtattacggctggtggccgctgctctttgcggaggtttgattggatgcgagagacaaagtaaaaagaagacggcaggcaccaggacccatgtaattattgcagtggcctctgccatgatgatgattatctcaaagtatgggttcggggatgtgctgaacgagtatgtaaaactggacccttcccgtgtggcggcgggtgtggttacggcaattggctttattggttcaggcatcattattttccggaacaacagtgtgaacggaatcactacctcggccggaatatgggcgactgtgggcgtgggtatgtccatgggagcgggaatgtatattctgggggctgtatccacagccatcgttatgctctcggaactgttcctgggcaggaaaggttatttttccagaaggaacggggaggacaaagaggtggagattgaatactgcgaaagcctggatgaggacatcttccagttcatcaaccggacattgcagggccagaactgcaagatggtaaatatccagcttacagaggaggcgtccgcctatgtgctgaccgcccagttaaagacgcctgcggactacgatatgtccgacctggtggggcagcttaagaaaaagagccagctgaagcgcatatccgtgcagtaagccaggtgagtgaattgctggagggctgtccctattgccatacgcgttttttgatgtcggatctctatccaaaggtaacgaattattattttctccgggattacggattgggagagcaggcggccggaaacagcgtcagaaagtggatgcccgcaggcggcgcggcatgtctggtgctgcggcttccgggaatcctttcagagctgttgtaaagattctcatttttgctgatgacagagagaatctggtgtttatgagggacggccggaggaatgcagctttgacgctattgcgaacgcccagtttgagggagctgtcagcttgaatgcctgccgggtggagggaggattactgttatttggatttgggagtatacatgacagatgtgtactgccagggctaggggctgcaccggcagccggaccggttccgaatcggactgtgtcggaatataagccatcccgaggactatggtttctccatcagattgtgatgagggcggtaagctgcaaactggggagccagctttgacgccaccagggaacgtctgtgcccgtattgcaggatccgccatgatttgaaggaggaggactggatcattacatatatgcggaaacagccctgaatgtatggtctatttctcccgaagtctgaccttattcctggcgctgcgccttctctcgtcctccagtgcggcatagtggcgcttagtggtattgacgtcggagtggcccagcacatcggctaccagatagatatcgcctgtctcgcggtacaggttggtgccataggtgctgcgcagcttgtgtggggtaatgggttttaatggagccacggtgcgggcatactttttaaccagattttccacgctgcgcacggccatccgcctgcgctgcagggagagaaaaagggcgtcctcgtgtccctgttccgggatgatacggtcgcgttcctccaggtagtctaagagggcgtcctccacctctgttccgaagtatacggtcacctccttgccgcccttgcggtagatgcggatgccgccgttcttaaaatcaatgtcggagatatttagccccacacattcggacacacggattccggttcccagaaggagggtaaggagggccaggtcccgcgtctttgttttcgcatggtaacttttctgcttatcggtcagcttgtcaccttgttccacctcgtccagaagtagggccacctcatccacgtccagccggatgatttccttttcatggagtttgggcaattgtaccagggcggcaggattgtttttaattcgttcattcctgtaatagtaattataaaaacttttcagggaggatattttgcgcatgattccccgttccttgttcatgacctcctggttcctgtcattgaaacggtatttcaggtattccatatattcctcaaaatccgtgacagacagctggtccagctgatccaatgtgatatccttgacagtaatcttggcaatagccggattttccttatggaggaaatcaaagaacacatgcaggtcataggcataggcaatcctggtcctggaagatgtcctgggctcgattccgcggaaaaagtcaccgcagaatggcggcaggtcttttatcagattgcgcagccgcagaatgttttcccggtctacctgttcatggtatgataattgactcatgtaagtggatgcctcatttcataaaatagtcttgtcgcgtcagacgcgctataagatatattttagcgtcaattgcaaatgattgtcaattgattgttttttacttattgataatgactttacggaatacaagaaaatccagtcagtctattttaacagatccagataagccccgtatccttcctcatccatcctgctgcgggggatgaagcggagggcagcgctgttgatgcagtagcgcattccgccggtcccggcaggaccgtcttcaaacacatggcctaaatgggaatctccctcgctgctgcgcacttccacgcggtgcatgccgtggctgctgtcagggtgttccgtgacggcgcgggacatgaccggctttgtaaagctgggccatccgcagccggaatcaaatttgtcagcagaggtaaaaagcggttctcctgtaacgatatccacatagatgcctggttcatggtgattccaatattgtcctgtaaagggcctttcggtggaggcattctgtgtcacgtcatattgttccctggtcagccgtttttgaagctctgtctggtcctgctttatgcccgttctcccgtccggacgcacaatgaggtccttaagactgctgaaatcaatatggcagtagccatgggggtgattttgcagatagtcctggtggtaatcctctgccggataaaaattcctcagaggttcaaattccacggccagcggctggctgtaatccttctgaatttcatacatgacagtctggatggggccgcgatcctcatcactggtatagtagatgccggtccggtactgacttcctcggtcgtttccctgccggtttacgctgacagggtcgatgattttgaaaaactgtctgaccagtatgcgcagtgcaacaatgtccggattgtacataatacggactgtttcagcaaacccggtggtgtctgagcagacctcctcgtaagttggattgctcctggttccgttggcatagccgcactcagtatcgcagacacctggtatacgggaaaaatattcttccactccccagaagcatcctccagcaaaatatatattctgcatgatcatttcacatcctttcctttgtttccttctgaattggattcatgatactattatgcccttgtaagggactaaaatcaatgaatttctgaaccaatactttttcatggaactggaggaagatgactgtaaacacatggcctgcaattggaaaggaatcatgcccggaaaaacaggacgggtatgggtgacagaagcgctgaatcaggatggttcctcccagggcctaaaaatcaagaacggattgacagaaaattttggtgaagtctgtccgcattcatggcgatgtggcacggtttgagaaaatatgcggctttacaatagagagggaatcccgattcgggatgcactgactccaaaggaataccggcagattctgaggaatgtccgctggcacccaaaagaatggtacctgaggctacgcagtcctcaggtacccggcattatggtatcggctgataagattatagtttttcatacgataccagctggtttacatcaattctctaccgtccgaatcggctggtatcagcagttccggcatcggaatatccaattaccagacttgctttgggcgacaatcaggcggaccggctgaagattggctgctgtgggggcaacatgggcggcttcaagaattttctccaacttttccggctcgaccttctgaattcctttctgtttttattatggcttcaaatcaaccattgactttattttatcatctgtcatataattcacaagaatgcacttttaaggtagatactttccaaaaccatagcataccaataggagagcaaataggaggaaaccatgatacagcaggaagcttcactatatggagttacagcgtctcatacccaatgcaacacccaaaatggtatcacagcagcttcgtgacctggaaaaatccggtttgatttccagagaagttataccagaaaaaccgcccagaaccatctattccctgactgaatttggaaaaagcattattccggttctggatgtgatgtgcacctgggggaatggattacttaaactgactgaatgtgaaaacgccttgtcaaaagcaggagagggtatgaatggcgtaaaaaggatactgtcatttccgtatttgatgtgattcggtttacgtaaaaatattatgtaaacaaattggcggctgattaaaataatatacacctttaatatataaaattgcagacgaggttgggattaatcaatacttagtcaaattatgttcagcttcagcaaaagaataatattaataatatttattcaattgttagcaaatggggaaatcataagaaaacatagaatacgcagggattacaaagactacccctgtcaactattcgttaaactatccgcctctttcacgaaagcgtcctacgccagtaggtgaagccaagcggtagttgctaggaggcgacataaattataccaaaccggagcctcctgcctagcaactatttgtgaaagagtagtttaacgaaagtggaacggtagttggagtaaggtgcagcaacaaacttaataaaattgtaaggcgacaatttggttaacatcaacttataatatatgagagtagcttcgaatctgcgagcagtccgaagctactctcatatattataagtaagcctatttgattcaatgactatacctcattataacattagagtaattcaatgaaaagacctgaaatgggtcttttttgtttggcactcatcataaagtctgatgatatcaagcctcgcagagcacctaaagcggaacggagtgtagcggtactttgcaaagcaaagtattgggtgcaatactttagaaaagttattatgccatggcttccaacataattaaattgaaacaatacttttgtgcaatactttgaggaggcgatataatggcaagtattgatttcaagaaaattaaaagtgctggtgagctgaaagcaatgctccggcattgtgataatgatgaacgtctgaagcatgaacatagtaatgaggatatagacaaagagaaaacccacgaaaatataaactatacaaaactgacttatgggcagtcatgtgccagatttgataaacgcatcgaaatcttagattcttcaacaaataagaataagcgtaaagatcgagttgtggcatttgggttaacagttccatcatgcgagggaatgacaagagaagaatctgcatctttttttatggactgctgtaaattatttcaatccgaatttaatgctagaaatatcatttctgctatagctcattatgatgaaatacattcatatatagttgctggtgaaatgaaagagagcagagagcatttacatttttatgtaatacctgaaatagatggacaattaaatgggaaaaatttttcgtctaaaaagcgaatgatagaacttaataagaagctggagaaactagccatagaaaagtaccataagaattttcttacaaaagagccagctcgtaaacgttccgttgaagaattaaagagcataagcaattcagagcaagaacggagaattaaggttcgtgatgaacttatgcttgagatagagaataagagcaattcactaaaaaaaaccttaatggaattaagagaattggaagcaaaacgcgattcagaggaacaagcctatatgaactatcaagaagagccgtttgactatccggctgaaataaagcgcaaaaagcctttacttggaaaagaaactattgaaatagaagctagtacagcattgcttaaatatcagtgattaaattactaatggtatcccggcatatgtccacttaaatgggtgtgctgtaagattgtattgttcaataaagcgcaggatgcttgcttccagttcttctattgataggtagcttttccgcttcagcagcttccggttaatgatgccaaaccatatctcaatctggttcatccaggaactgtgtttcggagtatagacaaagcggatccggtgggaagggtcatgcaggaaatccgctcggctttccatacttttaaggatccctgttttcccttttttgcccagttccacgccaagggcacaggcttctgccacaaagcggacaagggcttccgatttatgggtgtttaggccatcgcatataaatgtccatggggcttgcgggtctgtccctaccaatgctttcacggcttccacaaaatcctcttctgtgcgtgtggagtttaaatacggcatttccatacggcccgttgcaacatcaaagaacccgatgaggctggtcgtgccatggcggatatactcaaactccattttggcgcactggccgggtaatgggagcttgtcaggatatttatgttccagcgcttgtaccccggtcatttcatccgtggaaacaatgtgtgcaccttcccggctttgttcctgggcactctggtacaggccgcagatttcgtttactttccgcgcaaaagattccggggcttccgtcttttccgaagaatgaagccagtaacggattttgtggggatgtaaatctacctcatttttaaaaaacggctgacagatttctcagaaatctgttcagcgatcccctgctttttaatttctgccactaacagcgggagactccactggcttacttcgtacccaaaatcatttgggctgctgcaggcaaggtcgatgatccgcatgatctggtccggcgtaaaaacagacggggcaccggggcgttttttatcggacaggactgcccgtatctcatcttcaagctttttcgggtcgtccatttcaatcctccgcaaggctgggagcgccgcgaggaaccgactgcgccaggtggcaacattattataatgaagcccgacctgtggtgcaatattctggttgagttccccctgtgacgcaagcaggacaatgctggctcttttgaccagtcctgacggaagggagcggctttttgaaaaagcagataatatgtttttcatggcatcagataaaaccgggatagtatcaattgttttccttcgcataataacccatccattctttagtgatagaattattatgcaccgactacaataaaaaagcaacgtctattcattattattttggcaatgctgtactagtgaatacgacagattcgtttctaaagttgcagagtgtgaagatgtgttattatattcaaaaaaacgtgaaggtactatttcagaaatagagactcaatttaaagaaagcatattagaagctaataaagtactagatgaggctgaacaaatgcgtaatagaacggaatctttatccaaacaagctaagcactataaaaaaagtctagagagcatacgagtatatgccataaaacatgatgatgagaagcttaaagaatttgctacgaaagctcttttgcttgatgtagataagccactacaaaaaactgccgaaaaaacattaaagaatgttatgcaccatgatgattatgagcgttaacaagtggtgatggggctatcgcccatcaccaccagcatcagaataaagtttatctatcaatccattcccaacacctaaaccatagatatataacaatttggttatcaacaattttcagttcagaataattggcaattcctaaaagaaagttgagtgaatgcgcttcatcacaagttaataaagaatctgctgtaatagtaatatggatagagttttcttcttcccataaagaaaactctgcctcattttcaagttcaaaagtgaggttctcataattcttcacaatcaattctttgcgttctaaaagaatcaatttcctatgattttgctcgtattccttcaattttgctattatgcgttcaaatccattctccatataacacacctccttattaaatacctcactatattatacctcactatattgtgaattactagaagtggattaactggatataataaaaatattcagagaggtggtgagagcgtgggttatttgcatatgagaattaatgaaatgttagaaatccaaggtaaaagcaaaaatacagtctgcaaagaattagacattccacgttcgaacttcaatcggtactgtcgagacgaatttcaaagaatagatgcaaacctcgtctgtaaattatgcgaatactttaactgtggagtaggagatttaatcgaatatatgaaagactaagaagctggaaacagcttctttttatatgatgccaaatccatcattgaggcaaagttttattactttgccatcattgagtaaaacctcatatgaggttttaccacatagaggtggaaccacctcacatgaggctccgccactccctgtttttttattttatcgaattgccgtaggctcacatgaggcgcaggcctgctcatatatgcctgtcagcagactcatatgtgcccgtcggcagactcatatgtgcttgccagcaggctcattgagtgcttggaagccttctctatgattctatatattctatagacataaaaattccaataaaatcaatagttcccagacttttttgtcacgtatttagtactggattgtcacgtatttagtactaaaatcgaatttttgtcacgtatttagtactaaaatataaaaaagtttttttaaaatactataaaagtataaaaaacagaacttttttagtaccaatctaacattatatattatgagaaacaaataacgtttattaaggtgatgcccatcaccacagggaggtaaaaccaaaatgaaaaataaaaatgagtacgtgattcagtggaagattgctgatgataaaatccataatcagaatcttaaaataaaaaaattgatggatagcagtacactattaaaagacgaagatggtaatgaaattattgcttcaacgctaatggtaagtgcaaaccagtttcataaaatttttcttgaagattttatgaaaataatgggattgattggaaattcagaaagcaaggtcttttcatatatattggcaaatgctaattataataatatcccaatttcaacagcaaatacctttgtaggaacatatgatgaaattgcaaaatctgttcacacaagtaaacaaacagttgttcgagtcatgaaaaagctacaggcaactaattgtataatcaaaattagcgcaaaaacataccgtataaatcccaatcttatcagtattggaaaattaagccaacagcaagaggttatgcaacaattcaacgaagatttaatacataatttagaggaggaaaacaatgaaagtaagcaataaacaaaaagagcaagcacgcaatgcagacttaattagcttcatgcaggacaattatccaactagattaatgcaggatggtaaggcgtggcgagatacaaaatatcctgatataacaatatggcggtcgagtagggatggaatgtataaatttaaagctcatgcagtaaacacacaagcaatcaaagaagatattaaaggttctgatacaatagcatatctgcgaagatttttggattatgattactcgggtgctgtaattgcattaagtcagtactaaaaagccagaaatggctttttattgcatttaagcctagtttaacgaaagcgaagcgatagttggattatagaatcaaacaagccttaatagagataacgtaatgaaatgcgaaccataccctaaaagaacaagacaactattcgttaaactagactttcgcgaatagttgacagggtgtttttatgtgttgcaaacaacccggttactgcttctgtgtggctggtttgtaatataaataaggaggttttgtatgaaacttttaaactctgtgaggaagtatggtgcgttgccgattgcttccggcctggtgtctgtggggcttgcggttcctgcctttgcggctgagggaagtcctgcgggtccgaccgattggtccggtgttatatctgccctcacggcccaggtatccattagcactatcatgggtgctcttgctacatttgtcgccgccggtatcggtatcgtgtttacctggtggggtgttcgtaaggggattcgttctcttatggcggcattccgtaagggccgtatgtcaatttagtctcttggggtctggccttccatggttaggccccttttttgaaaggaaagtttatggaaactaacttattggatggtagcttaaacccggtcaatgttgcaagggtgattaagcataaccatgatttttataagtcacatccgggttactttcggcctgagggattgttggtcttttgtggagaacaagggtctggaaaaaccttgtccgctgtgcagtatgttaagcggttatgtgaggaatatccccgggctatcctgtgcaccaatgtccagattagtggcctctctcctgctactgaggtggtcgaatacgacggcctggattgtcttaaaaacctggaaaatggttattatggtgtgatttatttgattgatgaaattcacctggaatttaacagcctggaatcaaagaacattgacattgaggttatgattgaggtcagccagcagagaaaacaaagaaagcatatcataggtacatcccaggtatacgggcggcttgcaaaaccgttccgggagcaaattagaaatgtggtgctttgttccaatttctgcaaaatccttcagattaataccctgattgatggtgcaaaatcggttgaaaaggatggaaagctaatcacggaatcagtaaagcggttcttttggttccataagcctgaattgtatgatagctatgatacatacgcaaaaatgaaacgttataaaaaagaatggcaaggaaggaggttgtcttgatggtacaggaagcaattaatctgtttgcagatgtggttgcggcggctattccttatgcggtggtgtttgcattgggccagcgtctggttactatgttcttagggatggcctttaagggttacgttgaaatatgatgatgaggtggaaacatgttatattatgtactttggttctttctgctcttgggtgtggcaacgtttttgcggatgaatacacgcttactgaggaaaatcaggcggctgattcggctcaggatgaaaatgcggttcctgatttaaacggctggctatcttccgtcccggatgggggcatagactttgaccagtaccaggaaatcatgtcaatcatgtatccggaattggttgaaacagacgaggaagatttggaggatgaattggatgttgcatcttcttctaatgcttctcgttctaatgctagacagacggttcagaacattcttacgtttaacagtgtggctcctgcttcggtctatccatccccggatgatggtactatatcaaccacgtatctacagtactttaaggatatgcttgtgaagcttccgtatgatacgcaatatgttttctttcgggtggatgattatgaatatcgtatggtatatggtgatgcaattaatttttctggcaatgtattttctggggatgctttgaattatatacgttactatcggacgaataattatagtgtttggaaattggaatccggttatgagggaagcttccgtttgacaacaaatggttatcttgtatatagcaatgtcggtgatttatacccgtcaatgaatgggggtgtttatacatatgcggtttatgcgtgcctgtttgtgctggtgcttacttttctgtttaacgttgtccatgcctttttcttcgtgggcagataccgcttctagaattgattcaataagtgttgctacttccagtaatgcgttaccatcccaggactacatggaaacggatgattttgacacattggatgttctttccgttgcgtcctctggtgatgatactgtatctaattcagttgattattctggtgtacagatgtgtcttgcttattatgatatgtctggtgtaaggcatcatgttttttcacaggtcgataaaaatggttatgcttctattcctctcccgtctaattatgcatctggtgattggtttggttttatattgttaaagcggtcattgcctcctgctggtaagtataatgtgcaggttcattttgccagtaatacattcatttcttatggtggttcttctttgtggttttcttcgcattataataatgtacatgaccctgaatcatcgtttggtgtaacgggtacttatagttcgggtgacttttatcttagttctaacgtttctattggtgcgtctgcccaacagtttaatatttctaattggcttaaatcggatacaggtacacctccttggggtgggtacgttagtataagttttactaaattatctaatgatgcgcctgttcagggtggctcgcctggaactgataatgttgaccaggatattaaccaaagtatatctaataatacggctcaacaggtagagcaaggggatacgattattgagcttattaaaaatacgatacaaactatatcttctcagcttacggcattttggaatcagcttgccggggaatttactaatctttatgcgaaaatgacgcaacaacattctgaacagttgcaggctgaccgggataatacggatgatatcatagccgctgataatgctaacacggataaagtcacaggtgcgattgaaaagcatgggaatttcatcattgaggggttgaagtcgcttttcatcccctcggatgaatatttcaagtcctggtttgatggcatgtatcagttctttaatgacaggttgggcttcctcatgctcccggttgatttactggtgcgcatggttgatatatacacgtctgctggttcttcttctgttggtatccccttcccggaatttaaatggatggacggtacagttattatcccgggccagacggttcagtttgattttctaaatacagactggggtaagggcattcaggataagctttattttgtcggcaatctaatcatgattggcgccttactctccctcatgcataggaaatttgaggaggtgttgcgcaattgattttacaagctgtatttgaccttgtagcggccctgttaaaactggtctttggttggattaatctgcctgatatgccgtctgctgtaacatccgtgattgatgaattatttacctgtatacagggcggcatgggtatcattagtgtgttcgttgatatatccatggtgaagatacttctgcctgtcctgctgatagttgtgaactttgaacacgtttggaagttcaccatgtttatattgcgcaagataccgttccttggtattgagtgattggatgtgtgtatccggcctgctaggcttcgccgcaggccggggctttcctgattggaggtttttatgtctacgtttttaacatgttcatgttctgcctgtccgtattttcattggtttatctggtttggcatgggttgcgcatgggggataatctgggctggtatttttaatccccttgttacttcctttttgttattcctagcacgattgctaaaacgaatgctaaaacgattatggttataattgtgttcgttctgctggacggctggctctctttacatgttgattgtgccaatattatcccgccctatgttaaccgttttattgcttttctctcctgttcgctccatatcttgggcgattaggtctttaatatatccgcttaatttggtgtaccccctggccttcatgtgttcgattacttccgggtattcttcctcacggatatagactttcactgttttatatgtgtctttattgtactctcttttgtattctgtccgttcatttttgttcatattgtatatctcctgtctaggcctagacactatgcacaatttactaggcctagattcgtcactatgtctattgtctaggcctaggcattatgttatactatagttacaaagttaataaagctccatagcaacgagaacatgatacagtgtagcagtgagaatggggccactaattcaacataagtatatcagattcatagcaaaaaaggaaggggaaagagaaatgactgttactgacctcctgatatgacgctgaccagatttgttcatttttcagcaggctgctctaactcatgtcagtcattgcggtggcttctgggtggatttctccacccttaaaaccatcgttttgatagagagtgctcctgcataggcttttcagtcaaatggaagcacgccttgatctttgacaacttcatactgctttgcatgcggcgatttgaacctgcgcagtttactgctgacgttatccatatgctcctgaagatcttcaagctgtccgctgatgtcatccatggcgatcctgatatccccatggagcagttctatggaattgagggcttcctccagttcgtcccggatgtccatgtattcctccagcagatccaatacgccggactggcgcatgcggtcagcaaaggtctctgccgggcgatgttctttgttctgaaccatcaggcctcacctcccagcatctcatgttcgaggacaaaccttacctgatgttcgtccgtgagacgctttccctgctggctggcgtacatcaggcagccgttacagatccggttgatgcgccttgggatccccgtggactcgcggaagatctcgtccatggccttatcggtaaagatatcctgcctgcctccggcatacgcaaggtgggaacggatatatctttccgtctgcgcacggtcaagatggggcaggatgcagcttaaatcaatccgctgcctgacggccgcataccgctggagccggagtttatcccacagctccgtctgcccgacgagcacgagtgccatagggctcatagaatcgaatttataattcagcaggaagcggaattcctcaatggtctctttttccagaaggtgtgcttcatccaggatgcagacgactttcctgccctgcacgccgcggatgatctccacctccttctgaagctgcctcttggcatcgccgcggtagaactttgattccacgcccagctggtcgagcatgcctttgtagaaccatcttggggtcagtttggagtccgacaggtagaggaagatatattcctctttggggagcgtctccacaaaacggcgcaccagcgttgacttgccgcacccggcatccgccgtcaccacggcgaacagctggcggtctgccacataagacaggcgcccaagggtgtccgccatcgccggtgactcatacagcatccccgacgggatatcgcgcacgaaagggagacgctgcatttcgtaaaaagctttatacattgctgccaccatccttcctgtactgtccgaaagagatggcatctgccatgtgctttttggatgctgcgctcttcttttccagcgcctccagcatacgggaattatccggctccgtttcctgcatggaaatcggcagggggtcttttttatcacaaaacggcctcatttcgagcggctttgcggtaaacggttcaatccctttatggcggatcgtgatggtttccggcgaagcagggtcataggaaatctccacccggaaaccgataagggacggttttgtctcatatttgcggccctgaaagctgatacagccgcccttgtcaacaaggcgttcttcatgatggaggaacgcttccgccactacggatgtatccaggaactttaaaggccggcagtcccggttccactcctggagaggggtgatcccttctggtgggacgggcatgccaaggctctcataatactcccggatgccctcgtgcggctgcttatggtagtattcctccaggtagtttttccagtgccggttaagctcttccagtgttttgaccttatggatccgggcctccctgagaaaagcatcggccacctgatggaatttttctattttcccctttgattttccgctgcggacttttgcgtgccgaaccgtaatcccaagtctggcaagggagaatttcagctgttttgccacatactgcgaaccgttgtcaaagtatacggcatcacaagccccggccttcaagaggacgttccggaaggtatcctccacgatgctttcctcctggttgtcataaaaccgggaatggaccaggtatctggagtggtcatcgatggcggaggacagatatgtctgcaccatcgccccgtttttccctatggggagcttacacccatacttgatatcagcctgcagcatcatcatcctgttgggcttgcagaaacgtttggacgagctttcgcgtgcgcttgcgtatgtctgcatctgtctcgtgccgaaaccggctttataaaggtgacgctgcagggtagggcgcttgagtacgcccggctccgcccagccctcctgctccaggatgaagatgatctgctccacgctccgcctgggtacttccttcctcagttggattgcctgctccacaatcttccggtaattatccggcagcctcccggagacaaccgcctgagccggcacgacgggtttgagaccctcgaagcctttttcttcataggcggcaaggtaccggaagatggtacgctcggataagcctgactttgaggctgcttcttcccgcagctggctgcgtttggcgggatccaggctctcatcaagcagtggcgcgatcaaggtgtagcgtgagagcgcctcgttatccctccagtttaaatcttttttgattgtctgcatggtatgcacctcctttttggacagcataccgcaaaaagcgctgacagccaaaacaaagtgggtgcatataagatgtcctcagacggataccaggaaaccgcctgagttatagaccatgcgcaggacagcgggaagccacctgtcacaggatttcctaattgtttccaaaatggccgcgccggccagtccgggattccttaagaggctcatagcctgccgacagtaaccttctgtccgggagaagtttgccataagccagtggtgccaccgccgtatggtttcatcacaaggataatcctcgttcatggtatcctccggcatgatatcaccatccagcacggcagcgataaggtcggagccataatgcttataagggacgagcttatcagggagaagactgtgaagcctccggcagccctcattgtcacaccgtctccgctcaatcatcagccacaccacctgtccgccatccagcttcatgattcgtggtttccagtcacggtggctgacaggggaccggcatatggggcatatacaattttcgttacaatggatagtaattacgccatcccccttgtcagattccgtgtactctgatacaataatcatggttttatcatgagtctcagaggacacaacttagcgggagggtcttctgggactttctctttctgtagaatgttcattgacattatacagagcaagtctctgacattcaagcagagcagtatggatgacaaattagcttagcaacaacaaaatgacaaaaaaggagaaagaaatttttcggcgttaccttgattattcatgtgctgaaatggttcgttgtatatctggtgaggggcgcgctgaatgcgctgttgcttctgctgtatttgttcagttgcaaggtttatggaacgaacttaataaggttgatacggagcaaggggcctagccccttcccctttaaagctactctctccatagagaacggtcacaagtccgtgtaaaagctgagtggaggttttaggcgaggttttgtataaatgtaacgattgttccgattaagtaaatcattgcattgattgtcattccgatacctaaaataaagtattttattaaatccatgttttcacctccttggtgtgatatggcatatatggtgggtggggtttctttttggtggtacatttagtataccccctcccatatctgtaatcaattacatatttgttacggttgattacattttgtttaagcggtttgtttgtcaattgctatcgagaaattgacggttggatttaggcagaaatactgccctcccaggttgatgtaaatgccctgggtggtacgttgataatagaatattgaaaggaaggtaaaatcatgaaagttaaagttttaggtattcagtccgttgactatgtgagccgtaagactggcaaccctgtcaagggggttacattgcattctgcgtttaaggatgcacaggtggaaggtgaatctgtatcttctatctttgtcagtgataatctgaatcttaaatgtatttctgatattcggcccggtatgctggttgatgttgaatacaataaccgtggttatgtctgcgatttggctatctgtaagtagtagtcggcttttcgcacttctccttatgctggctgttctgtcctggttcagccagcccccttgcgggtgattcccgcatttccttgttcgctctccgtgccaggccagacagcggtttagattcgtcattacgtgtaatacctacgttctgccattttcctgctggggatggcttgtaaaacccccgtagggtaatacgggggtactaaatacagtggaggtcggaatggaaggaaacttaataaccctgtctaatgggttggttgtgtcggttgactggctgtcgttcacggtcatgtcaacggctgatgttgtggatgtgctggatatgtttggttatgtgatggatgatttcacacggatgccaaaaggtgcccgtggttacaggaccatgtttcggcttaacggctattcactcagcgttttgtgtgatggtaacccggacatgggtatacatattgatgtggccggttctgccataggtgaactggtccgaagtttttcggaaacattgaaagtaaatacccccttcggtgaggggtacgacatagattttgatagtacctttatggtggctctcttggagcgcatacgggacaatggtcatgttaccaggattgatattgcgatagacgatatcggctgtaagtacttctcaacggatgatgtttgcagactttactcaaacactcagattgtctcaaagttccgtaacatgcgtaacgtggttgaatccgaagtatccggccgtaaaacaggccatacggtatactttggcagtcgtacaagtgatatctttttgagggtttatgataagcagttagagcgcaatcgcaagctttctgcaactggtactcacattgataacccatgggtccgctgggagcttgaacttaagaatgaccgggcggttagtgtatctaaaatgcttacatctggtattcccctgggtgctgttgctgttggtgtcctggggcattacatgcggatgattgagcttgacgatatcaatcgttctcgttgttctacatatcccgtctgggctgattttatggatggagtatcatcacttaagataaccgtcccaaagtatgaaaagaccatggacgagaaaaagacctggataaaaaggcaggtcatgcctactctcgccgctgtcattttggctgatggtgggagccttgaatttgtagaggataacctggaaaatggtttaaatcgtatgaataagtcattgtataaaatggcaatggatgaactttgtaattgatatagattataactaattcgcgaaagtctggctttcacaaatagttgacaaacaagcgcgctcctacgggaatattccatgtcgcgcgctgtcaactaccatttccctgactggcttcgccagacattttcgtgaaagtccttaccgtgctttcgcgaatagttataaaccgctctattcaaaccaagttatacaaattcactcgtaaaatcaacatttaacgcaatcttcatttcacagtttatagcagcatccatacctggggtttcatactccgcgcatgaatgctgccttctttttttaacattccttcctttttaaactttaagccttaaaaacatatatctttaagcggcatatccgccatgggtacttttgccagtttcattgcagagctgttcaaattcttttaatttctgctttgcctctggcgtcaggttctttggaacctgcacctctactgtcacatactggtcgccatgtacagctggatttcctgagaccacaatgcccttacccttcagacggatctggcttccggactgtgtacctgcctttatcttgcatataacatcaccataaatcgtggaaatcttgacttcgccgccaagcactgctgttgtaaacggaattgtaacggttgtataaacattctggccgtctctgcggaatcccggtttgtcatgaactgttatgttcaggagcaggtttccaggctccccgccattggttccggccataccttttccttttaaacgcattactttgccgtccgcaatgcctgccggaatagttacctccattgactgcacctgtccgttttcgtcctgcagacggattatttttttgcagccaaaggccgcttcatcgaaactgacttctatgcttctctggatgtctgcccccttttccgggaatccatgtctggaataggttttgttgaatccgttaccccggaatccattggcggttcctctatgaaaagcaccggaacctccgaaaatatgtttcagaatatcgtccatatcctctccgccttcaaaatgatattcacgatagccattattcatatctctgtaggcataatgggggccattcccaaaaccattgctttctgtgcttccataagctccggctgtctcatcaaatgctgcatgcccatactggtcgtataattcccgctttttcttgtcacccagtatatcataggcctcatttagttctttgaaacgctcttctgcctggacatttcccacattgctgtccggatgatacttttttgccagtttcctgtatgcttttttgattgccgcggcatctgctgtcctgctgacacctaaaacatcataataatcttttttcatcattcatgctccccttctttcctttggatatttaggtaagagaaaaacgggagaacacccaaatgctcccccgcataccttcgctactatattatctcttggttgtattacatttttttcgctgctggttcgggttctctcttatgggacaaacattatcaaaacgacggtttcatagtttttttgttccataaccctatctgttatatatgtgttataacacatgacaagtatagcgtcaagagtaatttgcaattatttgcaattatttgatgaaaatttttaaacacgtcagaggtccggcctccttttgaagatgccggcgtaatcaatatcatacaaacgtagtctgattccggattttccaatccatgctgctctctgtatccgaaagtccaaactctgtcaattgattcccaaaagcttcagtatttcattgtgaggcctgtccgcatccgcctgaaacacatcaatgtgattcagatccccgctcctgtccgtaaaggcagggaacaaaaatccgcatacgggtttatccggctcatactttccgctcagggggcagacggcgcaaatcatatattcaaatacttcctctgattcccactggcgttccctgtcagaaccttttgccgggatatcataacggtcatggaacacaaggatggcatactccctgtccgcacggtaatgctccatgacaacatcataaaaggtatccatcagggcatcatttttcaggccgcattcgttcatggccatgagcagctgccacatacttcccggcttccgtgcgctttgagtatattcgtattttctcaggtttacatttgtggctgcaaaggggatttccttagccagtttcagtttctttgtccgttctgatgctgataatttcagaaaattaatattaaaacttccgtcaaaatccccgtccctgtccacataacatcccgcaatcctggtaaaggaggtgcgggaaagggtcatccgtcttgtaagctccagcatgtcttctctgtttatcataatctgtcaattaccttcctgtcattttctgtcattcataaacagattgtatcatatacttcatggaccaacaacttattttcctgctgtaaaggaaagggccgtatctccgtcagacgcagaagcatttatattccgtcctgtcaggtttacgtttccataggatgatgtgatttggcacgtagactctcacaacgccctgctctcgggtgccgtttgtgttacataccatgaaacccgccacattcatctgggtttggggattctggatacaacggaaggtcagggtatcctggctgacatgatactgcggctcagagccatatgtatacagacggtactccagataataccgtccatcctcagagggcaggatttctatattattgtaatccttctcaatatccatggagtgaaatctgtctggtatagctgggaagatggatggttaaaccgcaacacttctcacacaggacaaatacccgtatcctcccgcccatacccccgtaatcgtattatcttcggtgtccagattaacgtatattctggaaatgctgttaagattatgtccctgttcaaagatatactgatcttgcctggatgcgtactcgtataaatagcaggccagcgcacaattggaggtgccggtggcggattcctcatctatgccgtaaagcggggcgaaattcctgcatatggcggccaatcccctctcttttgcaggggaaaacgcatggatgccgatgcattttttcttccggctcagcctggtgatggcggcaaaatctggcgtcatcctgcccagaatctcaggctcccttaccggaaccaggatatcccttaaacctgtggatacgatttgcacaggtaaggtatcggtgatgacgtctgaatcaaagcatgcctgcacatcccccttatccagcctttcgtagaatttcgggatattctgctccatgaaaatcaggccgctttcatccgcacgtattctcaatataccggattttgtctcaatggtgtactccggttttttgagcatccctaaatgccgcatcacagtaaaagtcccgattgtggcatgaccgcacagaggtacttcccctgcagaggtaaagtattctaatttaaaatcagccagctctgagtcaaagacaaaggctgtctctgaataccccagcagaaaggctgtttttgttttttctgcttcattcaggcaggcctgctgcaagaccactcccgccttatttccgcccttgttatctttgctgaacgcatttgccacataaacatccatgtttattcgctgtctctcctgtcatcatgcaaatggaacataatcctgtttttaaactcctgtgccttgccgtcgttccagtcatggaccggcctgtaatagcccgcaatcctgctgtaaacatccgcagctcctttgcatttcggacaagtctcctgcctgccgggcaggtagccgcaggtctggcagatggtgtaaacgggagacagtgtgaaacagggaatatggtgctctgtaatcattccccagagcaggtcccttgcctgtttccagtcctccagttcctgctccatgtacacatggaatacagtgcctgtggtataaagcggctgcagggaatcctggtttatgagcgcatcccgcaatgtaccgtcataatctgcgggcagcttggtgctgtttgtataataaggcttgtccccatcatgaccggctgtccggatcccggagaaatgctcccggtccagtctggcgaaacggaaggtagctgattctgcgggcgttgcttccaggccgtagagattaccgtactccatctggtatccaatcagcttttcacgcatatggttcaggacagagacagcgaacttctctgtctcttcggattccaggccggccttcagccacggtgcattgagtcctgcttcattcatgccgatgacgccgatggatgaaaagtgattgtcaaaatcagtgaggtaacaggccgtatagggataaagtccattttttaacagggtggagatcaccttccgcttaatgctcagggaacgggcagccaggtccatcatctggtccagccgggcaaaaaactccttttcgttctttgactggtacgcaatcctgggaagattgaccgtgaccacgcccacggaacccgtatgctctccgtacccgaaaaagccgcctgattttttccgcagcacacggaagtccggccggattccttcataagaagtccttacatcttccggtttcatgccgtttcccatgtaattgacgaaatacggggtgccgtaatgggatgccagggaaaacaataaccggttttgttccgtatccgaccagtcataatccggtcctatcccataagccggaatgggatactggaatcccaggccattggcatcgccttccagcatggtttccaggaacgcccggttcaccatgtccatttccttctggcagtccccgtatgtaaattccattctcctgccgcccacaatggccttttcatcagccatatcccctggcaccttcaggtccatgaaaatgtgggaaaatggggcctgggtaccccagcggctgggggtgttgactccaaagacaaacgcctccatgcatttcttgaccttatcgtaggacaggttatccgccttcacaaagggagccaggtaggtgtcaaaggacgaaaatgactgggaggcagcccactcattctgcatgattcccagaaagtttaccatctggttgcagagggtggccaggtgcctggccggggatgcggtaattttcccggtaatgccgcccaggccgtccagcagaagcttcctgagggaccatccgcagctgtagctggtcagcatggacaaatcgtggatatggatgtccccgtttacatgggcatcggaaatctccctgtcatacacttccgtaagccagtaattggcagtcactgcgccggaattgttcagaatcagcccgccaacagaatatgtgatggtggaattttccttgacgcgccagtcctccacctttacgtagttatccaccacatccttatagtcaaggatggtcttatctaaattcctgattttctctctctgtttccggtacagtatgtatgccttggccacatcagtgtatccggattcctccagaaccttttccacgctgtcctgaatatcctccacgctaatccggctgtcttttatcttctcctggaaatcagaggtgacccggagcgacaatagctcaataatatcagccgtgtatgatttacctgttgctttaaaggccttcttgatagccatcgttatcttatccaattggaattccacggtttccccgtctcttttagccactaaaagcatgttcttgtctcctcctcgttaggtgtgaatcactgtcagtataagcagatttattccattatatcaaagacatgggcataaatacagcatcaattcatcagaatgggatgtctccaatggcctgaatcaccgcttccaaggacttctcatatcgttggcaatattatagacaaaaggagctgtccagatgactgctgtctcttccttttgatagcatgatagaaatacgtccccgccttccatcctgtaaacagacagtactgcatcaggagggcctgtcggcggtacctgacctggaagaagggtccagttcctgccggacatatctgtaaataactggtccatcatccgatcggacgtggtataaaagtgatttcggttttttaattgtacattcaccgtatccacggataggcgggaaatgcaaagccgggaaatgctttctgtctccatccagtttttttgtgacatatacctaatggtttccggcccgtcccattttcctgttgcattatcccatatatcatcctttccctgtgctgttccagtttatactaaaagtatacaataagtgcgggaagataactcttaattttcccttgcaaaattcctaatatcgatgactctgcttttgctgccgggctttatgcccgcaaactgcacataatcaggagaatgaagaaaataccggacataaaaaaggagccccgcggccccaatgatgtgatgccacaatcaccggaactgcggggttctgttttgttatgtcagggttatccctcaatggatatatacttcttctcctctgccagtgactttgcatccttcttgggaatggacagtctcaggatgccgtgtttgaattcaccctttatatcctcgtcagtcacgtccccgcccacatagaagcttctctcacagttgccggcataacgctcctggcggatatatctgccgctgttcttctcctgctcatccttatccaagcctttggcagcgcagatggtcagatatccgtccttgagggataccttgatttcgtccttcttaaatcccggcaaatccatttccagctcatattctgtatctgtttcacggatgtcggttttcatcaggtttttgcctctgcgtccatatatttttttctccagctttttcatatctctgtcgtcaaaaaatggatccctgaaaaattcatcaaacatgttttcaccaaaaatactgggcattaacatacatcattcctcctttgttttctgtgcggctcccaaaactgtttccgggagccatgtatgtttcggtctgtcacctatcatgttaaccttcgattgcaatatactttttctcctccacggccggttttgcttctttcttgggaaccagcatcttcagggtgccgtcctcaaatttagccttgatgtcctcccgggtcactgcgtcacctacatagaagcttctgctgcaggaaccggtataacgctctctgcggatgtaggttccgttggaatccttctcatccttgctggaatctgttgtggcctgtatggtcagatatccgtccttgagctctgcctttacatcttcttttttgacaccgggcatgttcatggttatctcatagccattttcagtatccttgatatcggtattcatcatatcgaatgtcttgtggctgccgaatgagtaatcaaaaaagtcatccaataagttttctccaaaaatactaggcatcaacatatgtcatctctcctttatttaataatctatgaggctgttatagattgtactggaaccggatggaaaggaatttatgaaatacatctcatttcatctttttctttcctcctcctttgttctatgtgtaatataacacgtattattagcaaagtcaagggttgagtgctaaattcacatttttttcacattttggcatttgcagtctctgtcaatgatttaaacatttcctcatggaatctttatatatagcccatgatttggatatggaatctttaaaccctatggtgccgctataatgtcatccaaagaagtgataaggcatatgaaggaggcgtattgatatgaagaaagagttgtggagtgacatggctggtttgggaatcatgtttttagttatgatgggagcggttgcagtccgtgcatatatctggctgtaatcatggtgctgccggttgacgggatacggatttaacattttatttcctgatcttccttaaatcaggcgaaaaacgtgaaatattacaggaaatccaaagatcttaccatggaaaaatccatgcagggctcctatacttataacaacaccatatgacaagtccggcgggaaacagaagccggtgatatgcaaaggagtgtaagattatgacaagtatgttagttaagtttgaacagccggaacaggtggtagattttgtgaatacactgagccattatgactgtgatgcagatattaagtatggcagctgtatggtagacgccaagtccgttctgggagttctttacctggcggtatcccgcacagtggagctgattcttcacattgatgaggatggctccagggatataaaaaacagacttgcgaaatttgcggtataaacggaacaggattcggaaaaaagcagccggctgcgattcagccggctgcttttgactatctgattatgattgtgatggcggcggcgaacacggctgtataggccagtccgagaattgccagacgccaatattcctttatgattttaaatgatttcataccgcacgcctcctgaatttcatattgtgatttcattatataaaatctctgtaaattctgagaggcatattttgtaaaatctttgcaaaaatatttacataaaaattttatgtaaatcagtgatacctttccggccctatcaatctgccgcgcggcagcattattcaatgggcgcctgataaaatccgccgtaaaagttttccgttttaatcatattgacaatgacatgaggatcctgttcccgcatgagatgcacaatgtcgttcacctcataggaggataccacggtgtgaagcagatacatcttcttatgactgtaaccgcccaccgcgtccacacaggatatgccgtgtctgtattgttttacatactggtttatgatgtcctgtgccttagtggtggtaatctgcagcgtaacccgttcatatctgtgatgaaaggcagagatggctttggtggatacgaactggaacaggatggaatatcccgcatacagccatccgaacatgtatccgaagatgcagagaatcacgcagttgcctgcaaacacatattcccatatggtccgtcctgtcttattggaaacatacagagcaatgaagtccgtgccgcctgtggaggcgtttccccttaaggcaatggcaatggacagtccgtacaggaaaccgccgaagaccacatccagaagcacatcgttgaacagaggttcaaagctgcatattttgagaaagaagctggccaggaacacctgcagcatggaataaaaggtaaaacgcatgctgatgctccggctgcagagaacggccaccggtatattgaggaccagcattcccagggaggtggaaatattgtgcccgtagagggaggcaatcctgtcaatgaggatggccacaccggtaaatccgctggacagaaggttggccggccgtatgaatgcctgaatcacataggtctgcagcagggccgacgccactactgccaggatggttatgagccttctcaccagtatgttctttttgtattttgctatcatggtcctatctccccaactccccaaggctgtctaagagctggcggaccagtgtctctgacaccacgtcatagcagtttgcatgaggaggttctgcaaagccgtaggtcactccattggatgtggtggtggagtccgtcatccagtccttgcaggagctgtgaacctgccttattccggtttcttccatgagcattctggcattggaggcattgatgccgcttccggcaaggatttcaatactgtttccgtaagctgactgaagggctcccaacaaagcctttccttccactgcctttggtttcagaccgctggtcagaagacggtcagctcccagctcaatcagagtctctatggattcataggggttggaggtgcagtcaaaggcccggtggaatacggcttcctttccatggctgtggataatggaaatcatccgggcattccgttccctgtcaatggaggcgtcctccctcagacagccgaatgcaatgccgtccgctccgtggcggaccagatgttcgcattccctgagcataacattgaaatcctcttcactgtaacagaatccgccgcctctgggccggaccatggcaatcactttcacattgcagtgttccttcacaagttccagggatgccagggagggcgtaagcccgcccaagtgcagggcacagttcagttcaatccgtccggctcctccggacgcggcctgcagggcatcgtaatagctgccgcagcatatctccaacatataaaaacctctccttcttcctgtacgtcattccagtgccggtcaagggcctaaagctgtgcgagacggtacagggccagtgcatatatttttgcgttggttaccaggtcgtccacggtcatccactcatttggattgtggctgattcccttttggcccggaaaactgggaccaaatgggacgattccgggcatggccttggcataggtgccgccggtggtggtcacgggagtcccgtccatgccggtgacccgctcatagctgtcctgcatggcttttaccatgggcgaatccttggcaaaaaccaccggatcatagttttgcaccagctttgccttcaggccgcagccctctgccttttccgttatgggcttcatgatatcctggatgacaatgccgcctgggtagcttaaggtggcgtcaaaggataccaggttttccgtgtccgtgtagttcccatggccggtgttcccgccaggctctaatcccagtctgtaaccgcgcatctccatcataccatattcttcatggtagtagtcaatacctaatcggtcgcctgtgtttccggcgccgataaaatatttgtttacaaagtcgaaaaatgtacccaggcattcccttgtgccgatgatacgcaccactgcccttccccgctcactgtataccacaggatatttgcagtccggcgtaaatccgtatacaggaggattttcttttgacagatagtacctgaggtcctcgaatcccgtttcttcgtcacatccgaagataatgcgcaccggatgcctgagggttagccccagcgatttgacggcggccagtccgtacaggcaggccatgacaggccctttattgtccaatactcccctgccgtatatgacgccgtcttccatatggccgccaaagggcggctctctccagccctcgcccgccggcacaacgtccacatgccccatggcgcagacatagtcttctcccctgccatggaatgcatatccgatgtatccgtccagattaacggtttcaaagcccatctccctgctgatggagagggccaggtccagggattcctttacaccggggccaaagggagccccatcccgggcctccctttccacgctgtcaatgcgcaccatctgacggacatgttcaaccagccggtcccggttttcgtcgatatagtccagaagctttctgtctatctgattctgctcatccatattcctattcctcaatgggcgccatgcgcgtcttcatatagttttccatccactcatccgatgccttttcgtaggtacagcggccgttctcctggcgggtcaccagatacacggttggctccagggcctccgtgacaacggcaaaggaaaatccctctatgttggtggccacgccccactcgccctttgggttcatggctataagggataaatcacctgcctcgcccctgcgctccctaagctccgcgtccaggcgggacactgcggtctcacaggcttcctgtggatgcataccctctcccatgaggcgaacgatttcataggaaatgcagcccttcatcaggtcctcacccaggccggtggcgctggcagcgccctttttgctgtcagcatagaacccggagccggatatgggcgagtcccctacccttcccttcttcttcataaagagtccgctggtggaggtagcggctgtcattttgccggtcatgtccaggcaggccatgcccacggtatcgtggccggaataaggcttaagcttctgggaggcggcctggatggcggcctgggcggacatctcctttatgcgttttctgtaatgggcctttgcccggtctgtcagcatatttttgcgctcaaatccttccttatgggcgaatttttcagcgccctccgccaccagcaggctgttgaccttttcatggctcaagcgcctggcaatggacaccggattggcaaagtccctgatggccgcaacagcgcctatgtccagggtattgccgtccataaaggcagcgtccatttccacttccatctcctcgttgggaagtccgccgtaaccaacggatttatagtaaggaaaatcctccacttcccggatggcagactcgatggcatcacctgcgtcaccgccgtttttcagcatttgggcgccctttgtgattccctccactgccatgcgccaggttgcaatcataccccacatcctgtatatcctcctctatttgaaacagaatttatgttccagttccgccgtatcgctgccgtcagccagtgcctttgccaacgtgcacatgttcttaagcgcgtcattcagtcccatgccgccctttttcggagttttcacaatggccaccttgtccttgtaggcagctatggtatcttcgttctcagcggacatggctgcaaatgcctttgcctttgtggtggcgttgatgtcgcatgccaccttggcgcacatacccgcatagtcagcgaaattaaaggcaggaccgcacatgaccacatccggctgcagcttgtttaccatggcgcagagcttgcggctgacctcctccgggtcagccaggaaggttccgttgccgcagcacaggcaggctgtcacatggccgtccacctgctttaagaagggctccatcatgaccgcgggaccgatgggctctcttttgcctgtaaggggaaccattgtgtcatcttttgttccgagaccggactgaatctggtcgtatatcataataattttcattatcatcacctcatattattgtatccccattgggactgtcaaaggaaggccgggccgtcaagggcagccgtcctacaggtcgtcaaaggaaaggtcatcaaagtcaaagtcatcgtcatctgatttctcggaggccttggcctcatcttccaggtactgcttatccatcatcttgatgaacggcatgtagataaatactcccagtataagcagcagcagctgcagtacggctccctgccatcctgttgccaggaatccggacagcaccacaggcatggtccatggaatggcaacgcccgtacagatgggaaccagaccaatgctcatgcagaaatatgaaatcacgatgtttatggtcggcaccagcatgaaaggaatgagaatcattgggttcagcacaatgggaaggccgaacacgatgggctcgttgatgccgaacacgcccgggattaaggccagtttgcctaattccttgatacgcttggaatggcagaacaaaagcattgcgatgagcagtgacagtgtggaaccgcatccgccgaaggttgcgaacaaatcctggaactgctgggaaatgatgttgggcaatgcctggcccgcctggaatgcagccaggttgtcggcagacagagtctgtaggatgggattgaacacagcgcctaccacggaaccgccgttcactccaaagaaccagaagaggtgaaggaatatataggcgattaccatggccggaagcgtattgcccagccttaaaagcggtgtctgcaaaatagtaaagataaagttaaatgcatttttataaggtgtcattgcaaacacgatattcatgataaagaataccagtatggatatacctgccggaatcagggccgagaatgactttgctaccgtaggaggaacgccgtcgggcattttgatgacccagccctttttatttacccacgcatagatgtggactgacagaaaggccacgatgattcccacgaagatacccttggatcccacccagtttaacggaattccggtgacgctggaaccgccgtccacaagaatctcatagggcataatgaggaaccagctcaccagggcaatggcagcgccgaaaagcttatcaacgttcatctgctccgcgaaggaatagccaatgcctatgacggccagcaccgccatgatggagaaggtggcatcagtgggctttgaaaaataggatgcccagttgtccccgaaaaaccgggcccagaaatccgtccatcccggtatcgggaagttggcaatcagcaggaaaaaggaccctacgattaacagcggcatggacagcaggaagccgtcgcggatggcaatgagatatttattctttccgattttctctgccaatggcatgagtacggattctaacttgtttagcatgattcatgttcccccatttcaactatgattgttttaacgcgggccggctgcgatgccgggccggactgttattttgctgatttcatgagcttgatggctgatttcagcaccttctcgccgttcatcataccgtaatccgtctgatcgatgacctgaatcgggatacccttgtcgccgtacttttcaacgatctcgccgtagcggtatttgacctgggggcctaagagaatcacatccggatgcttctcgtcaataatctggccaatctttccgtccgggaaagcctccacttcgatgggaaggtcatgggaattggctatgccctgcatcttgcttgccagcatgctggtggacattcccgcgctgcaaaataaatatactcgtttcatgattaaatcctccttgatatctatatagtctccttttattgctcctgttttatatcggcgggtaaaacacggcgtccgtccttaccggttttccagccttttctccagttcagcgattcgctcgtagctggcaagcatctcttcagcgatgattttaaagccttccgcgctcatgagctggtcttccgcatgaaccagaatcatggaaccgcctacctgctctccctgtgcttccttctgaatcagttcaaaatgggcctcatgtccagccaggaacatctcctggccggcccttatacattccctggcgccttcaaagtcgccctgctttgctttctggattgcttcgatgtagctggaacgcgctcctcctacattggagataatcctgaagcaaatcatttctaatccctctaccatttttgctgcctccttactgtctttgaaacgagaaaatgcaacaaaaccattctgtttgctgcatttcttattaagttgccttaattataaggcagttattcacttttttccttaaaagcatttcctagctgctaggaaattcaacccattattctgtcaataaattcctcatagctgcatggagccactaattttgccagctcctccggctggtttgccacgttggatacccagtcaaagaaaattttaatcattctggcatccccttcgttgatggcaaaaagcatgaccagacgtacctcaaaggctccccatttcaccggattcttaagctgggccacagcaatggtggaatttctggcaaaggcgccaaaggcatggggaatggcaaaggtgttcacaaaggaagtgggcgacatctgctctctttttaagaccactttcgtgaattccggctccacgatgccctccttttccaggcccgcgcacagcatgcggatgatttctccgggctggtccatgtctacctgggagtggtagtgctcctttcgtatcaggtttccgatatgggatgtgaattccagccggaacccctttttgtccaggcggttgatggcctggaggatttttgactctgtttccgagtccacaaacaggttgatggagactgtctccacatccagtccgtgctccaggggaaaggtgctgagaagcaaatccgggtccagggccgacacctcgtcctcctcaaaccagccgaatacctttaccacctccatccgttcacgaaacatgtcggatatctttttcacacacatgtcggagaaggactggttatgaggcagaatcatcacagccctgtattttctgatggaattcatgcgttcactggcagctcccaggtgaagggcaatataacagctttccacatctgatatgggccgtcccagtctctgttccagaaactccagcacatagattcccatttcaaaaacaaggggatatttgcgcttgatttcctccacaaacacatcctccatccgcacctggttcttaacacgttcgatgagtccgtgaaaatgcatcttaagccccgccatcaggtcggcgtcctgcctgaaatccaggccgaacagagcatagacctgttccagggcttccgctaccagcttcttggtattcatccactttccattgtaattgacaaaatcgctggtgtaattggaagcccgtctgcccatgattaccagggcaaacatgcccacctcgccgtcgtggaccgttatgtgcagccgcttggaaatgcgttcaaagaaggtctgggatatctggtactcgatggtttcctccagcccctgcatcccctcctccatattgatgtaattggcgcagttcatccgttcaatgctggtcccagcgtggagaatcagcatgggaaacatggactcatggatggaatagtcatattcttccagtacatccacaaaaatatccttgacctcaatcaggttaaagcttctgtagagatgagccagggtgttcaggttaaggaagttctcctgcacctcagccaccagtaaatcccggtagaaacgacgcttgctggcctcgtctccctttaaggaaatgcattccttattccgcaccagcttaaggccgccgtaaggctccagcatcttgcgtatacgctttaaatcattgtcaatagaataaccgctgacatagatctggctctggagcatggtaaggttcagctcctttacctcaaaaagcagtttttgtatcatgtatgcacagcgggctccgggagtctggggaatgtctgcctcccttgtctttgccccggacgccaaggcaggccgcgcgtccccgcacagcctgtatccctgacgcacattggactcgataggcggcgggtccgtgtgcttattgatggcctccacatcggatcggatggtccggtccgacacctgcagaaggccggccagctgccggctggtcatccagtctccccgctctgataatatggcaagcagctgctcctgtcttttattctgcatggttaaacttcctctcttacagtcttatacaatacggaatgcgaacaccttccatggctcgatatagtctaacagcacatgttcatattccggaagatggccaatcacatttttgcggccgtcattgggcatatcctttgtgacgatgtggagctcccctttatatttcaggtaaccgtcattgagaatgaccacatcgccctgctttaagtccctggtgttggcagccggaatggactgatccgcaaatgtcaccctgggccaggtggatcggatcatgtattcgcttatatcccctctcaccacatgcttaggctcatagtccaggatctgccgctcggtgtccgtcagctccttttccagttcaatgccgaaggtaaggatgctgggattgacggccgcgcaggcattgagctcctcgtccgtggcataggcattggcaatcagcacatcatctatcatgccggtggcaaacatatggcgtacctggaaatccagaggaaggccgcggtgcatttccagggtacagagcccttcgtttaaaggccatggcccgtaagctccgggcgcattgctggatacaaacgcagccacccttaggcccagtgatttcatcttgtcattgcacctgttaaaatgcttcaggctcagtcccgtatatgcctgcggataaaagttatggcaggtaatcagtttctcacggtccggatggtgatccatgatgttctccacataaacaagcttggtgctggcattcagctccaccttcagcccctgcggattataggtcataaggctttccttcatgccgtcaaatccctcgtccagccggatgccgtccacatgcatttcacggaacacggacaggtcctcaaaggagattcccagccttgaaaatacagcaggactgacatccggaatgatttccatgccgcaggcatgagcctcgtcagccaggcggcaaaactgtccgatgatttcctccctgctcttttcaccaatacttaaaagacaggtaaaaatcctcttataacccagtttacctgcctttctcatatacgctatgtcctgttcttctgtggaatgctccggataaatagaaatacctaatcttgccataatattaacccctctttccaaatttgaactgcagagcagttctttgacattaactatagcctgtcaagaggggattttacggtaaatccgtttcctaacagctaggaaacgggttgattttatcatgggcgcctgtcagagcgtgtttataaaatggtgcgcatgagcccctttaagaaaccggaggcctggctctcgtcaggtccttccaccgtaagctccaggctttctccctgccccgcgcccaaactcatgagagcaaggacattcttacagtccgctgtaccctttgtgcctgtaagggttatccggctctcatattctgcggctgccctgctcagactcatggcattggtagcatggagcccctgcttgtcagacactatatatttataacttatcatttcatcatcacccttaatttattctccctccattttaacataattaacttttcttgacaaccaggtgtgtggacaggtagaatagaaaaagccgtgcagcattccggcaaagagcaaagacgaaagaccggaggcattgaaccggcaaataatgaccagaaaggattagttggaacccacatgaaattgcaacgtcttttgagcctgacgcgccaggctcttgatacatacgggctgattcaggacggcgaccgcatcgccgtaggagtgtcaggaggaaaggacagtttaaccctgctccatgcccttcatcatctgaggaggttctaccctgaaaaatatgagctgtgcgccattaccgtggatttgggactgggcagcatgaatttggagccggtggcggccttgtgccgggaatttgaaattccatatgaagtcatccgcacggaaatcggcgcggtgctctttgatatccgcaaggaaaccaatccctgttccctgtgtgccaagatgcgaaaaggcgctctcaatgaaatggccaaggagttgggatgcaataagattgcctatgcccatcacagggatgatgtgatagagactatgatgatgtcattgttctatgagggaaggttccactccttctcaccctatacctatctggatcgcatggacctgaccgtcatccgccccatgatttttgtcgcagaggcagatgtgatagggttctgcaataagtaccagcttcctgtatgcaagaatccatgccccatggacggatacacaaagcggcagtacattaaggatctgatacataagctgcaggaggacaatcctcatataaaggactgcatgttccgggctatattggacggcaatataaaaggatggccccaggcgttgaaataatgcctgaggccatccttttgactttgctcttttacttctatgccggggcgcgctttacataccagggccgccctcgtccgcgtctgactgggcctgaccagggccgttgccctggcttcccgggccctgacttgtgctgtcagaaccggagccggaaccagagtcaggtttctctgtttcaggagcctttgtgggatggctggcggaaggctctccggcgccgctgccgcccggtccgccggctcccgggccctgttcctcatccggatttttcgtgctctcaggagcctttgtgggtttgtctgagacgcccggacccacttcttctgtttcctctgtttccacggtgctctcctgggtggtctcctccgtctcctctgtactttccggggtggtttcctcaggcgctgctgtttctggcggaggtgtctccgccggcacattctgggcaggcgtcttaccgcctgatgaaccgcctcctgatgaaccgcctccggaaggagccatcttgccctcctcataaagacctgtttcttccgatatatgggcgctgattttcctgacagaggaagaggggctgtaggatgtctcctctccgtacagaaactgatggagaaggactacattgctttccagggtggtgggcaccacgcagtccatttttccgattttcttggtctgccttgagaatgggaaaccggcagtctccccgatgtgatattttccaatatcctttgccagaggcagcacatcgcctactcctacgctggtggaaatctcctgtaccatgtagcctgccagtgaggtcagcgttgagacatcagcctgctttgcttttgccagggcaagctccactacctttctctggcgctccgtcctctggaaatccgtatccatgagacgcagccggctgtaggccacggcctggacgccgtctaaatggttcatcccggcctgttccagctgataggaaccaatgccggttgaattgacggtctctgtaatgaatccattgatatacttaaattccgcaggcgtgatttccaggtctatgccgcccagaatattgatagcctcggccactgatttccagttaaaggtggcatagtcgtcaattttgatatccaggttttcctccagggcagacacagcctgtttatgtccccctttaaagtatgcttcattgattttatgatagcttccctctgaattgattttcaggtaggtatccctgtaaacgctgacaaggcggatttctcccgtggacctgtcaatgctgcatatcatctgaacatctgccagggcgttcttggtattgccatccctgctgtccactccaaatacagctatattccagtatcctgtgggtctgtgaagaaacatccatgccccatatcctatgaatacagccagaaggagcaaaaggagccccttccatctgccttttttacgtcgttttgtcatctgtccctgctgccatccggcggatgctctgcccctttccatcgtatcctgccgcctgtttcctgcgcgtctctgattccttgaaacagtctgtgccgccctggccctgtccggattggaggcggcgcttcccgcctggcgggatttcccgctctgtacctgcctgcttcccgaggactgtgcctggcgccctcttgcagaaccggacgaaccatgggaggacctcagacggcgggagggcaccggaggttcgtcatccagataatcctccatggagaaatcaacctgcctgtccccctccacgccgtattcctcgccgtaatagtactcctcgtcatactcatcacggccatcataggattgcctggtacttctgcgctccctgacagactgcgcaggcctctggtatgccccgccgccctgccggacgccgccccttctggcacgcgccctcatacgttccagttcatcgtcattttctctgttattcatgattatactcctctttatctatttggttcctaatacgaaatcattccagtatacgccggtaactctcccagtcacttgtaacggttcccacttccacattattggaatttcccgtggtcttctggatacagagcatattcccctctgctgtccaacccaggaatatcaccacatgcgccatgggattgaaacgtatgcagatatcccccggcagcagttcatccctggacacaggcgtaccgctgcccaaaagcgtgcgggtgctctgggcccccagccctcttcccgtggcggaccagtatacccagtttatccagcccgaacagtccagtccctttaaaatcctgccgtcctcatccggtacggtcagagagccgaagctgttgccggtataaccaggtgccgatggtttgcctccccagtagtagggaatcttacctacggatgtaagggcataccgcacgaaatccttccgctgctggctggcgtcttccggaaccagccccatgtattgttcaatctcccgggagtttaaaagtcctttcaccggatagtcaactgtataaagtccgtattcctgagacccagtcctgggccagcaaaacgcctgtcatgttcatggtgtgggtattccagccagtccagccggaggtctttacagcctccagggaatctgctgcccggaaaaggctgtccgcctccgcagtgcctttgatcacagccagcaccgtgcagtccacatggcccggacatgtccgggagttggctgacagagctgtatcagaagttgcggattcggggtatgatgtatcagaggcagaggcaatggccgctgcctccccggcgcctttagcaccggattcgtctgcggctggctgtccggctgttgcttcgtacaggcagctgccgtcacagtaataaatatcacccatgctcacagagtacttgtgggaggcgttccacagcttgtccgcacagtcctccatggttttcatatctttaagcacgccgcagtaatgaagggtattgatgatggaaatgatttcccttgcgttggaagtgcttccggtttcctgtaagccgctgtttacaaagcgcacggataggttgcggaactccggtatgatgccggacggtgaagtgacggctgtatccggaagtcccaacagggaggcgagctgctggggtgtataattgtacaggtcatatagtcccgatatccatgaagcatcctttagggccagcatatcatagagccggcccgcatagctgtcggccggatccgtggagtctgccccgtcctcatagagatatgccagattaagcacctgggaatccataatgtccacattggagggtgttgcttcccggaaggccgtgcctggcggaaagagaaaggaaggtgagccgggaggcaggtctgtgtattgtgaggtggtttcttcagttccgccctcggagccggcagcagcgggtgccttctgtctcccgctgtatcgtcctgccatataggaaatcccgcaggcgcacattactgtcacggccagggctgaacactgcagaatctgccgtttatatttttttaccagcagtatgtaatcgtcttttttcatgttgtgcgtcctgttgtcagtcataaattatataattgcaccgttccccattatatcacacaggcaggagaatgaatagaacaaaagtcttaaagaatctttaaaataacgcgtaaaacagggattatgcagggggccggcaggactgctcacccaaattatgattgacgcataaaatagagtgagctataatattcacaatctatcacaggagggatggagactcatagcaaagctaagcgccatgcaccttttaccggggacgtgaacagcaggaaggtctgctgccggtggaaaggttaacgaggtggagagagaatcgagaaattcggcgggtgctctcccatgctgtccgggcgtgttacatactggaaaatatgcgggtaactgcaaaacaaagccagcgtgaccggatgaatgaaatcagataaaaaaggttaaaaaatggtatgctgaaaactgcctgtataagacagcttggttttttgttgtctttttcaggaacgtcaaccgcagttaaaataactgcaaccagcaaagaaaggcagaacaaattatgtgtggaataattggatatacaggccccttggaggccaaggatgtattgttaaagggacttgcgggactggagtacagaggatatgacagtgccggaatagcttacttcaatcaggattccctggtcaggaccattaaaaaggtgggaaaggtggccgccctaagagaatgtgtaaaatcagccggcgagatatcccactgcggaatcggccatacccgctgggctacccacggaggtgtgacagacgccaatgcgcatccccacagcttcggacaggtaaccctgattcacaacggaatcatcgagaattaccgccagcttacacaggaatatgaactggaaggccgtcttgcctcccagaccgacagtgaggtggccgcggctgtgctggattctgcttacagggaatgcggccaggatccgctgaaagcaatcgcggcttttacaggcatgctgggaggctcctatggtttctgcatcctttttgcggatcgtcccggtgagatatatgccgtaagaaaggtaagcccccttgttgcttcccacacccactcaggagctcttgtagcctcagatcttactgccctgatttcctataccagggagtatttcgtggtcccggaaggctgcatcgtgcgcctgacgccatacaaagtccgtgtatatgatatggactttaaccgcgtggagccggaaacactggaggtcagctggaacatggatgcggccatgaagaacggataccctcatttcatgcttaaggaaatccacgaacagccggatgcccttaagaataccattcttccgaggatggtggaccgtctgccggatttccgggatgacggcatcccggactccatattcgcagagtgtacccaggtacgcatcattgcctgcggtacagccatgcatgcgggaatggtggcaaaagcgctgatggagccaatgctccggatacccgtcactgtgtccattgcatctgaattccggtatgaggatccgctgattgattccaaaaccctggtcatggtcatctctcagtcaggggagaccattgacacgctggccgccatgaatctggccaaaagccttggctctcccacgctttccattatcaatgtaaagggatccaccattgccagggaaagcgattacgtattatatacccatgcaggtccggagattgcggttgccagtacaaaggcatattccgtccaactggctgccctctacatgattggctgccgcatggctctggtccggggagcattcagccgcgatgaggccagggaattcatgaaggacctgatggacgtcatacccgccatggaaatcatgattggacagtctgaatttattcagtcctttgtgcgccacctgattcgtgagagggacaccttttttatcggaaggggcctggattatgccttttccctggagggagccctgaagcttaaggaaatctcctacatccacgcggaggcgtatgccgccggtgaattaaagcacggaaccattgccctgatttacgacaatgtgcctgtgatcgccatagccacccaggaccatgtctttgccaagaccatttccaatatccgggaggtaaaggccagaggcgcttacgttatcctgctggcaaagaaacagtctgtggtggaggacggagtggctgacatggaacttcggattccggatttggaagaccgcttcaccgtgttccccattgcagtggccctgcagctgattgcctactatgcttccatcggcaagcatctggatgtggaccagccgcgaaacctggccaaatccgttacggtggagtaacagttttatggctcatcttttaccggacatccttttggacatcaataagaatgtgacattgacgtaaatcgagtaggaggaaggcgattatttcgccttccgacctctcacaccaccgtacgtaccgttcggtatacggcggttcaatcaacttaacatgtaacagccttttcggcgtagtagtcttccatggatacaagaccaaacttagctagtctctctttactgatacaaatgtggagattccagcttctgcacactctggcatatcctttggcatatgaaatgccatgtgccgcatttggcggcagaccaagtttgataagattcttttccctgttctttggcgttttccagtgtttccatatgcacatgcgcagtcgataccgaatctgtccgtccatttttgcgcacagccttttcatgcttccgattttgaaataatttatccaccctcggataagccggttgagtttcccaattttataaccattgcccactccccagctcctgcttgtatatttcttcatctgcgccttgaactttgctgccgctttcgggtgtggtctggctttgtaccctttggcaaatgagtcatagtaaaatccaaaccccagatacttaatgccctttggtttatcaaccctgctcttttccgcgttcactttcagtccaagcttttcctctataaaccgagccacgctcttcattacccgctctgccgcctgtctgctcccgaccattataataaggtcatctgcataccggacgaaatccagcctccttgcttccagttctttgtccagctcatttaacatgatatttgctaacagcggcgagatatttccaccctgcggtgtgccgactaccgtatcttcatactcatcatcaatcattacgccgctgaccagaatctttcttaccaccgatatgacatctccgtcctttattgtccgtccgaaaatcgtcatcagcttgtcatggtctactgtgtcaaagaatttcgctaggtcgatatccactatccagttgtgtccgtcattcatcatttccaatgctttaaggactgcctgctgtgcacaccgcttgggtctgaatccatagctgtggtcgtgaaactgctcctcaaatatcggggtaagcacctgtgccaccgcctgctgtacaaagcggtctactgctgttggcactccaagatttcttgtaccaccatcgggtttgggtatctccaccctgcggactggcttcggcttatacttcctcgtccgcaactgttccttaatgttttcgccgttttccgaaagatatgcgccaagttcttcaacggtcatcccgtccacgcctgccgctcctttattccttacgacttgcagatacgccgcatttagattatccctgcttaatatctgctccatgagactgcttgtgtccatgcgttgtttcctttctgccccttttgcctttgccgcctttgaagtcatcgacaggcgtatgctccggctacgaagtggaacgtacttcaactgattgattgttcagcccttcgctccgtccccattacaggaacttcctcactactatggcttctgctgacttctcacaattcgttgttactacggctaatgagaccgcctgtgagacctccccagttaaggtgcgtgttcttttcctccatgtacctgccgcatttactcgtacttccggcaaccttttggacttcagtgccttttgccaccttatccgtatttccgagccttatatgcggttcctgtccgtcaggtcagaggtttgcttacagcttctttcagattccgtctcacggcggacacccttgctgttcggctatgtgcttcgttgttgcctacgcgcacttgggactttcacccattagaaaacgcccatgctgggcaaacaaaacagatgcggcaataccggctttccgccggcgttgccgcatctgctgttttcgttacttatactgccctgtccctatgcatttcgccggaactacttctgttttctccactcctgcttcacttttgcgaaattcaggatgacgtccactgcgccctccggtcctgtgctgctgctgttgaggcacaaatcatagctgcggggatcgctccacttcttgttggagtaatagttatagtagctggcgcgctgtttgtctgtcttaatcatgatgtcctttgccttggacgcatccactttgtacaggtcctgaaggcgtttcagcttgtcatcgtcgttggccgtgatgaatacgctgactacattggggtagtcctccagggcgtaatccgcgcaccgtcctaccataacgcaggaagcctcgtcagccagctttttgatggtgtcaaactgtgccaggaatatcttatggttaataggcatatcggaatatcccgatgccgtatagcccatggaataggaatccataaccagtgagtagaggaaactgctggtgggccgttcgtcgtgtttttcaaacagctcctcgcaaagtccgctgtgttttgcagccatggataacaattccttgtcgtagcacttaactcccatcttttctgccagtaattcgccaatcatcttgccgccgctgccacactgcctgccaatggtgataataagattatttgtcattctacattcccctttctgcactgtctgtcctgtaggttataagtcatattttatctattaagtattataactcaaaaattctgaaaagtatatagaaatgtataaaaaagtaaaaaatagtataaagctttgcgacaaaagtgacaacttttccattaaagtatgtttttatcgcgcttttgcgtcctggttcagttcaatgtacggaggagtttatcaaagtattccggcaggggtgctgtgaattccatgtattctcctgtcctgggatggatgaaccccagtacgccggcatgaagggtctggccgcagagtccgcttatgggacacctggcaggcccgtacacagcgtcccccagcaggggatggcgtatgctggccatatggacgcgaatctggtgggtacggcctgtttccagcctgcactccacatgggtgtactgcctgaaccggttcaggaccctgtaatgggttacggcatccttgccgttctggtagttgatgctcattttcttgcgctccaccggatggcggccaatgggagcgtccacagtcccctcatcctccgcaataacgccatgtacaatggcctggtacctgcgggtaatggaatgctctttgagctgggcggcaatggagctgtgtgccatatcattcttacatgcaatgatgacccctgtggtatccatatcgattcggtgcacaatacccggacgcatgactccgctgatgccggacagctggtccctgcaatggtacataaggccgtttacaagggtatggctgtaatgtcctgctgccgggtgcaccaccatgcctttgggtttgttgatgaggatgacatcctggtcctcgtagaggatgtccaggtccatgggctccgcatcaatctccggctccacggcttccggcacctccagctcaatccggtcctcttccaccacaatatagcttgccttcacgccctggccgttaaccaggacctgccctgatttaaggagcttctgaatgtaggagcggcttaaatcagggcaggcttcagcaaggtatttatcgatacgcacatggtcctccatatccgtgggataaaattcctgtttcaaagggatatgtcctcctgtctgattatattcatggtttgtccggcaatgttgctgctgatacgtctgttaatgttttttgaatgagaaacatgccatgtcctcatccttgtaataaaacataattaaaaacacaagacaggcagcgcccaccgtgacatagcagtcagccacattgaaaatggggaaattaatcagtttaaaatacaggaaatccaccacatatccctggctgacacggtcaatcatattccccacagcgccagcgcttatcatcatcaggcacacagccaggggacggtatctgccctccggcggcatcttccatatgagataagccactgcgcccagcacaaggactgcaatgagaaagaagaaaagctgcttctcctgcatcatcccgaatgcagcgcccctgttctccgaatagtagaactcgaatacaccattccagataacaaaaggcttctgcccctttaaggattggacggccagtcccttggtccactggtccaggccggccagaatggcgaagccaatcaggaagctgataatcagggattgcttctgttttgtcattatgcctgtcctcctatcacatcaaaaccggccttcatctcatctgccgtgacagtcttgtccacataagcctgaccaatggaattaagcaggacaaaacggatgacgccggcttccgtctttttatcactctgggtggtcataaggacctggtcccaggcaaggcccggcgctgcggcaggaattccgaaggaaagaaaggtgttcctgatatccgctgcctcttccgccgtaagcatgcccctgagctgggatatgcgcgctgccgcaatacagcccagtcccacgcagtggccgtggtgcatggtgaaattctccagcttctcaaccgcatggcccagggtatggccgaaattcagaagcgctctctccccctgctccgtgggatcctgctccacaacacgctttttaatcatacagctttcgtaaaccatggcctggcacagagccggctccctggaaactatgccctcacggttatccttcagccactggtaatactccttgttcttgatcaggccgtgcttcaccacctcgcccatgccggaggagaattgttcctcaggaagggttaaaagggtgctcaggttcgcataaaccagcctgggcatatgaaaagcgcctaccatgtttttataggcatcaaaatccacgccggtcttaccgccgatgctggaatccacctgtgaaaggagggtggtcgggatctgaataaagtcaattcccctgaggtaagtggcggctgcaaaaccgcataaatcacctaccacaccgccgcccagggcagccagcatgtcctttctgtcaaaatgctccagaatcaggtgttcatacaggttccgcaccgtatccagatgtttattctcctcccctgccgggaaggtaaagaccgaaacagccttgcagcatccggacagaatggagcgcacttcctccagataaaggggcgccacattggaatccgtcacgatgcaaattttgtgttccttaacaggaaggcaggatactgcctcctttaaaccgtcaaaggattgggccagtacaatatcgtagatagcctccccatccctgcatacatttatcctgtcagccatgccagtgtcctcctgatattatacaacaaatcggcagacacaccaggtctgccgcatacctatcccctgtacagggacttctttttccttgtcaattacaaatggatattgagtcctgaaacgtccatgcccatggcgccgcctgcggccagaatgtcctggaaatctccggacagttccacggaatcaggtgttgcgatgaagatataattagatatcttctgcagattgccgttcatggaataggtggctcctgaggtgaaatctatgattctctgagccacttctgtatgtataccctccatattcagtaccactgccttgccagccagaaggtaatcacagatgtctctggaatcctccatggatgtgggtttaatcattgtcacttccatgctgcgtctcataggtactactttgggattggatcttcctaaaaaccggggcttgtcctgctcctcctcctcatcatattccgtattcttctttgagaacagtcccttgcgcggggcctcctcttcaaagtcatcgtccaggtagtaatcatcctcttcctcatcaggatttaatctcatggtatccattaacttacctaacagactcatcttacactctccaatctctatatgaagtgcttaccgggggaaacaccttatcgtgcaccgaaaataccggtaccgaccctgaccatggttgctccttcttcaatggcaacctcataatccccagtcattcccattgagagcacactcatagtaacattatcaatgtttttgtcacctatgtcaacagcaaattcaaataattttttaaaaattccacgattttcttctggattatctacaaaaggcgcaattgtcataagccccttaatgtgcacatgggagaaatccttaatctgcatgatggcatcctccacctcttccatgaggaacccgtatttgctctcctcacgggccacattgacctccagaaggatgtccacatccagccccagctttgccgcgtctgtctcaatctgctgcgccaggcgcagagagtccacggagtgaatcagtacggccttgtcaatgacctgatggaccttgttgcgctgcagatgtccaatcatgtgccagcggatatcttccggaagctccggtttcttgttcaggatttcctgtaccttgttctcaccgaaatccctggcccccgcgtcataagcctccataagcatggaaacgggttttgtcttgctgactgcgatgagtgtcacttcctcaggatttcttcccgccctgcggcaggcatcttcaatatgtttttttacttcttccagctgattttttatcatattgttttcctcccttactggtacagcagctgtccttcctccaccatggaggcatccagtacgatatgatcgtacacggacaagccgtatttcatgttcttacgcacagtataatattcgctgttggaatccagtatatcaatttgtttaaaaatagtatagcctttattaatattgtaaacacccttcagggaagcagtccttccaatctggtatcggtctgatgactcaggcctgaccacgtaatcccctgctttaaaaccgttctccttccccatgtccacgtaataaaattcatcgtccgaatagtagaccgttgtggggacgaatacaatggatgtgccgttttccgtataaacttccttataaaaaccatcctctgaggaatcgccgccctgggtcatgtattccagggggataagataaaagttcttgtccgttaccgcgctgacaggaatcttgaggccgtcggccttatctacttttatctcaaaatccacaaagcggtccgagataaactgttccatatattttgagaaatccagttttccataggcagccccgtcctttcccgtaaaggtggaataggcggccggtgtgctgagggaatagtcgcggaacacgacccgtaaggcggtcttgtcattataaagggccgcatcctcgtcgctcagcggaaacacaatggaccatttttccgaggtaacaattttataggcgggggagccgctgtcaatcaggtcccctgatttatgtactgtctttacgtaggtgctccggtcaaaatcagcggcatccacgtctgacgttgtcatggattcaaaggaatcaatgccgtaggataccacgccggatacatcggagcggacctgctcaaatacagcccctgactgctccgccagcttgtccagctggtccagcgtgctgaaactggaatactccatcactgaggcatccagggaaatcctggcgtcatagatggttccaaaatcctggttctggaaggacagaacaaaggatgtaagctgttttttcaggtccaataagctgtcgtcggaaagggatgtgccttcctcggcgttctcctttaacagtgcctccaggtttcctgtctcgtccagggaataaatacggcttcccacagaagcacgttttccctcccgcagataatagttgatatagccggagcggtctgctgttcgcacctgctcctcacggagaatcagcccgttgtagattcggttattgacgatgccgccgtccaccacctcataaaactggatcttctcccgcttcagatacgtataaacgctgaataccagatagatgaatatgataaagaagataatcatacccacattgatgttgagaggcctgcggtaacgtatgacttttttgcttttctttttggccataaatccggcctccttttacaaaatacacatcacttcacaaaaagctgccctccataccaggcattttaatcccagcaggttggcagcctataagtcctgtctgtattttatcacagaaaatgtatcattacaatgaaataatcacatcgcccttagcacactcaggaagctccgcagcgtccatggaaatacttaacacaaaggttatatggtatttttcaccgatatttttcaatgtcatatatgtatcagaaatgtctgctccctccagacatgacagctttaaaaagctatccaggtacatggtctccaaatcgtgatcctgagagataataccacagataaatcctaaaaatccatcgctgtttgtaagtgggaattcattgacattaatgagacgaatcttgttgtttaattcatacatatgctgggcactcttatccagatatacgacagtgccgttggcccccttgattgctgcattggccatatctaacagatgtttggtcttgcctttacctttttttcctgcaataatctgaaccataccaatctcctccttgagttatatatgttgtataaaaaatcaattaagattactttaattatagtataaattcatagaaagcgcaatcactatttgacgattttagaaattatatttgtcatgttatcatataggccgggtcggctgtcagattttaatacaacagatatatattccttatcatcctggtccctggtagccatgatgagacaatagccggctgcgtttgtagtgcctgtctttccaccgaatacagtcaggccttccggcgtctcccgctcccgtgtcataaaccagttcccgcctttccatgtcttggtgacggcctggctgtccttgtcgtggtagttggccgtataggatgtggtgcccacaatctgccggaataccggatatttgagtgcctcattgaaaatgaggtacaggtcataggccgtggtataatggtccggatcgttgagtccgtgagggttcacaaaatgagttccggtggcccccagactggcagcctcctgattcatcatgtcagcgaacttatcaatgctgcccgcaatgtgcaccgcgattgcagcgcccgcatcattgcctgaaggcagcatgagcccatataaaagctgttccaatgtcagggtatctcccggctttatgccgcacagggtggccccggattccgtgatgacggcatcatccgtcacaactaccctggcgtttaaatcaccgtttttaatggctacaagggctgtcatcaccttggtgatgctggccggatacagccgttcaaaggcttccttgctgtagagtgtttccctgtcgctgacatcaaaaagggcagctgcctccgatgtcacgtaactttcgtcaaagctgccttcatcctccactacgcataaatccgaagcaaaaccgtctgcatagcgcacggtccgggacaggctgtcctccatgaccgggattcgctcttccaggctgtagggttccttgacgcctgaaagacagcccgcagtggaaagagccacagcccccagaagaagcgcacacagaaagctgcgcgtccgcactgccttcattacctgactacctcgcgccattccatatcccctctgtcaagagccttgataagcagttcggcagatgccagattggtggcaaggggaatattgtagatgtcacacaggcggaccacgtcgtttacatccggctcgtgtgatttgggattctgcgggtcacgtaaaaagatgaccaaatccatctcattgtgctcaatctgagctgccatctgctgcataccgcccagatgccctgccagatatttgtgaatattaaggttagccacctcttcaatcaggcggcctgtggtgcctgttgcatacagtgtgttcttgctgagtattcccctgtatgcgatgcagaagttctgcatcagtttcttttttgcgtcatgtgcaatcaaaccaattgtcatattaaattaaccctccttggattagatatgtcttgtttctctctgaagccccacattgagcaccagcccgattcccatgaaaatactgattagggaactgcttccgaaactgatgaacggaaggggaagccctgtattgggaaagatgcctgtggcaaccgcgatgttggcaaatgcctggaacgcaatcagtgttgccatgcccacacagataaggcggccggataaatccctggcccgtgcagccatcataagacattcataaattatcaataaaaataaggcgataaccaccacacagccgatgaaccccagctcctcgccgatcacggcaaagataaagtccgtctgctcctctgacaggaaattaccgttcttgacagacgctatggtggtattgaaaagccctttgccctttagctggcctgaaccgatggcaatgatggagttattctgctgataacgggcctctccgtactggtccggataaaaccaggccaggatacgccctgcctgataatcctttatgaatggaatcataccgtgaagcagcaggtagacaaaggtggacattacgggaatggtaacagccagtgttcccgcaatccacttatagcttatgccgcttgcaaatacgattcccagtaccattaccataatcacaagacaggtagacagattcggctgttcaaagatcaatgccgccggaatggcaaaaagtacggctgctatggccacggtgctgacctgattaaccttttcctggtatttcatgaaataccaggaaaaggttacgataaggcctatcttaacaaattccgatggctgaagctgtccgatggccggaacctcaatccaccgcctggcgttgttcaccacattgccccaaatcagtacggccacaaggcttgcaatacacaggccgtatatgagagtactgaaattcaggattttgtggtaatccaccatggaaagaccaatggccacagccagtcctatgaacactcctaaaagctgcttgttgactgcatccgcgttcatgtttgtggcgctgcggataaccagcacgccgatgacgttgagtacaatcatataaaatatcagccgaaaattaaaatgtctgaaatcataatccaaaaacatatttaatatagccccttgttcgatatggaacgaatcggtatgttggcatgaagcacaggcagtgtccggcagccgcctttttggggactgccctctgtatccatctgtatctggactttgtccttttctatctccatatatttggaaatggcgtgtatcacgtcatcttttatcatcagtatcatctccggtgagcagcctgccttatcggataccagcaaaagctttagccgcatcttagctgtctctccggaacgcctggtttgaaacccctggaaccatctcaccttgacaccatcccttctatgctctcttaagtattccgcgaagcctggcaaaaaaggtttccgtctcaccgggatttgtcataggtatgctctcccccagtatcctgcggcagatatcaagataagcttgtccggccgtagagcccagtcccaccagaggctctccctggttggtggaaatgacgatgttctcgtcatcgggcactgctccgatgatgtgtactgccagaatgtccgtcacatcgcttaaggacatcatgtctcccctgcggaccatgtcggcccggatccggttgacaatcaagtcaatctcgtctatctccgcatgttccagcagaccgatgatacggtccgcgtcgcggatggccgagacttccggcgtcgtgaccaccagtgccctgtcagcaccggctatggcattgtagaatccctgttcaatgcctgcgggacaatctaacagtatgtagtcaaattcttccctcaggtcatcaaccagctttatcatctgctccggattcacggacgtcttgtcccgtgtctgggccgaaggcagaaggtataggttcgggtatcttttgtctcttatcagggcctgcttcatacggcagttgccttccaccacgtctacaagattgtagacaatgcggttctccagtcccatgaccacgtccaggttgcgcaggccgatatctgtatcaatcagcactacccgcttacccaggatagccagtcctgttcccacattggcagaagtagtcgtcttgcctaccccgccttttccagaagtaatcacaatgacctcgctcatgatgaaatcctcctgaaaattactttaccttcctattgtacattaaatttcgtaaatttaccagtatttttttggcattaagcaaaatttaacatattgtttaggaatgacttttttaaagaccgcataacaatggccccatcttccaccagggctatcatgggaccccgccccagacgcttgtttctctcgttgaaacggctgctcagatccccgatgcggatttgcaggggagccatgtcaagggccaggacaacggcctgtggattgccggacacgccggctgtcaccgtacccttcagctctcccagcacaatgacattgcccttggccgtcacccgggctccgtggtccacatttcctatgatcacgatgctggcctcggattccaggcagtctcccctctttagtgtaccccggtagaactgtcctgtctgggagttcagctccatcagcttatcattcagtgctttctcacagcgttcaatccgttccgcatccgtgtccagaagacagaggacttcaatctgcgagttcttcgtaatcgtatcgacaattgcaaattcctgggccgcggtcagttcccggccctccagggtcagggtcatctggacagagccccagaaacgggcgctttccctgaactttttcccgatggcctccaaaagctcgccaaagggcaggtcagggtccagaatgacagtcattcctgccttgctgctcttaattacaactgcattgtgcatacaatcacctcttttgctggtttagtcaccaatatttacatttgacacacctaatgcaccggagctttctatctgctccagggtggtatattcataataatactcgtacacctttttgccaagggttgcggcgttggttcccgcataaccgtaaggaatatttacagtcacggcaatttccggatggctgtaaggcgcaaaggatacgaagaaggcatggttggaacggctcttgtcctcctgggctgttccggttttgcccgccacctccaccgggagatcggagaaaatgctcttggcggagctgtccgtgattacccggcgcataccggtctggactgcgtcccaggtgctgtcagacgcgtccacgcgggagcttacggcaggggtatagtccttaatcaggttcccgtcagagtcggtaagtttatccaaaagactcagctcaaatacatttccccggttggcaagggctgccacatagcgggaaagctggacattggtgtaggaatgggtgccctgtcccatggcggaacgctccgggtcctccgatgatatctggggctcattctcggaaatctccacacctgatgtgtggtccagaccgaaaagggcagcgtatttgcgcagggtggcaaggccctggtccggcgaataggtgccgtccggcttcatacagagcctgtgggccagttcagcgaagaagtagttgcaggagttctgtatgccctcctcgatgttctcgctgttatgacggccgggccagatccagcacttgataggcttggaaatctgatcgtatataccggtacactcgatggtgtcctggagccctatcacgccctcttccagggccgccacagccgtgatgggcttaaaggtggagcccggtgccttctgggcctgggtcgcgttgttgtacagcggtctggacatatcgtcctggagctggctgaaataagccgcgtccacgctgcctgacatcaggttattgtcatagctggggtatgtgaccagggcccgcacctctcccgtctttacgtccgttaccaccactccggccgtacacgggtccagggccagctgcgccggcgtcagctccaggtcggatatcttctccttgataaactggtaggtgtaggtggaatcccccatctggagggctgctatggcctgggcgtcataagtcaggacgccctgtgcatagagggccagacagagctcacggcccgttatgacctcgtcattaatcaggtaacggaacatgcgctttgtgaatttattgtcgctgcgcagggattcgatgacatggtccaccagctgggtgaatatgtcatcggcatcggaatatttgctggtcacgtccagacgggtggtgtccacccagtttcccgcgatcccgctgtagatataatccctcaggctgatggtgccctctctccacgcctggtattccggcgaggactgatcaatcttatccttctgtatgattcctacggagccgtcagacagataagcatagatataattcatataagtagccatgtccttgggaagatcgttcatggccagggcatgggagctgagaagctcgttccgtatcgccgcaagtatctgctccctggatacctcgtatttgctgtaaatctgtttttcaatgtcagacgccccctcctgggacatatccatcagagacagcacattgttgttaatcagctggtaataggcgtccttcacaggaatgggtatcttggaagggtcataggtcttgttgggatccaaatcatcatactggagatggtagctgatgataccggccagctgctgctcaatcagcttgtaaatggcaatctgcaggtcccggtcaatggtcaggtatacatcgtccccggccttggcgtccgtcttttcaatgatttcacggggacgtcccatgttgtccacatacatcctggagtagcctttttcaccctgaagctccagctccatggatttttcgattccgatacggccaacgatatcattgagatcgtatttgtccgtggcgtcttccggcaggccggcagcctcgtcggactgatgccactgctcgttcagggtggacagctgatcctcctgaaccttgccggtataaccgataataggggcaaaatagatgctgtcctcatacttgcgcacataggactgctccactttgacgccctttaagtccgcggcgttttcattgatttccaccatggtctcattgctgatattggtggccacggtggtggtctcgtacttctggtattcggtcagcttcatggtgtagataatgtttatcatgtcaagggcaatgttgtccggtatgaccaggggattgcctttttcgtccttcatcttatccagctcgtagtccacctttttgcgctcaaatgcctctctggctgtgatgttggtgggatacctgccctttgggtcgttgaggccggtggtggaagaaagaccgtaaaaattcaggaagaaacgggtcctggcggaatcagagctggatgtaaagaacatctcgccgttctggtcaagggcaatctcgaattttccttccacggtctccccgcgccggtccagtatccgtaccaggcggtacagcatctggttgcgggaactgggacggggataatcccccaaatcctgtatggtgacggaataagccagctcattataagccagccggttgccgttcctgtcaaagatgttgcccctggaccccggtgtggtgacgcttttttccgtcctctgcatataggtttcctggtattcgcttccgtccagaatctgcatctggaacagcttgcctaacagcccggcaaacatgacggtaaatatcacggaaagtgcaaagagccgtgagctgaacagcttcttgaaaaattcttttactatttctaacagttcgtcaaacaagttttgtgtctctcctttttcctatatcctccacgcgtctgctggcggaaaggaacagcctgtaaatcaaaagggtggtaactgcggtaaatataatctccggaagcatgatgttcctgaaataataaggaagattcagacgtccgcggattaagaaacggaagacgtatatatacatgctgtaccagattccgttgaaaatgctgagtatcagcggaagggtgatgtagtcttcataatagtatttggtaaagatgccgttggcatagccgatataaatatatatcagggtataaaaaccaaaaggcccgctgtagaaaagatccagtaaaaggcctgaaaggacgccgtaaaacacccccgcgtttttcccgtggataaaaccaaaggaaaacgtaaggatcaaaagcagattgggcgatgccgacaaaaacggaagcaggggaaatacacagttctgcaccgtaaatgccagcacgatgaacaatatattgataagtacctgttttatctttgcttgaatcactggacagccgcctctcctgtatctttgatatccgtaatgatcagcacttcctgcagattattaaaatcagccgccggaatcagatagcctgactgggtcaggtgatccgggtcaatggagacatccgcagcgtatccaaccaggattcccggaaggaacttggtgctgatgttggaggtaactatctgatcgccgtccctgaggacggcatcctttgaaaaatccgtaagcttgagacgcccctcctcatagagagtcagatctcctgccacaatacagttataggaggaatccagcttcatggctcccacccggctggaatcgtctatgatggaacgcaccgtggcgtaattggcgcccacatccgtcacaatgcccaccagaccgccgtcggccaccacgttcatgtccacggccactccatcggcggaacccttgttgatacggaacacctgaaaccatttttccgagtcgcgggcaatgaccctggccccgattttatcatactgcatgtaattctggtccagctcgtagagcttccttaagcggtccagttcaaactgttccgcctgcagacggttattgtcctctgtgagctgtacaatctgtgttttcagctcctcattttcccgcagcgcgtcttttaagctgccgtaatcctttaactcgttatagatgccggtacccactgcgttgactcctgtctgaatgggaatcaaaaaataacccacaccggtgcgcaggggttccatgatgccgtccttcagggatgtgatgcagatgagcagcacgcacagcaccgtaagtcctgccagaatatatttactgcgtttggtttccatggataaacttcctcttacattaaattctcttcgcggaaactgagatagcgcctgtctccgatgacaacatgatcgatcagtgtgattcccaccaattctcccgcttccttcagacgtttggtgagcagcatgtccgctctgctgggggtgggatctccgctgggatgattgtgaaccaacaccatggacacggcccggcacctgagcccctctatgagtacttcccggggcgtcatgacagatgcgtttaccgtccctctggccatgatttgatcacgaatcatggcctgctttgtattcaggaacatgacgcggatttcctcctgctccagatggcgcatatcttccatataatagtcagatatttcctccggatgcccaaagtaaagggcatgctcgctggccttccgcttccagattcgttttgacagctctcctatacaaagcagctggaccccctttaccttccccacgcccttgattcccataaagtcatccagggagtggtgcaaaaggcccagaaggccgtctccggggcttccaagagccagcaggctgtctgccaggtccagggagtttccctccctgcttccggtgcgcaggatgactgccagaagctctgtgtcggacaggctgtccggacccagactcagacatttttcataggggcggtccttgtggggcaaatccttaattcttattctttccatctctctcctaactacgcacctctccaagcacaaagtcaggaaaattatatataccggtaaatgatgagtgccactgccacgccgatgatgctggccatggtaatcttgatggtcagtccgaaggtgatgaccaggatgccgaaattaattaccagaggcgaatccagcccaaaggattgtccgaaattcagccagttcagccaggaaatcccttctgccagctgtcccatgaagccacccaggacaatgcctgccagcagcatgattaaaagtatccagaaattcttgtaatgcatgtgtcttaccctccggtcagccaggccaagcccctggtccgcaggacccgggttcggcctaattagtatatattaccataagtttcccggggtgtcatcttaagattttcaaaaccccgtcatccgacagctgctgtaatgacttgagtattcccagcttggcgtggtaccaggtcagtcccccctggaaatacacggtataaggcggcttaatggggccgtcagctgagagctcaatggaggagccctggacaaaagcgcctgccgccataataacagggctgtcgtatcccggcatgtcccatggttcaggcgtcacatagctgtccaccggcgcggctgcctggattcccctgcagaaggatatgactccctcaggggtgccaaaggtgatggcctggatgatgtcatgacgggattcactgccgttcggcaccactgcgcagcccaggcgctcataaatgctggctgcgaatatggcgcccttcagtgctcccgacaccacaaccggtgaaagaaaaagtccctggtagagctgctggtttaaccccaggctggctcccacctccttacccagtccgggagcgcttaagcgataggaggcccgttctatacagtccttcctgcccacaatataaccgccgatgggagccagtccgccgccgggatttttaatcagggaacccacaatcatatccgcccccacatcggttggctcaatggtttccacaaactctccgtagcagttgtccaccatgcagatgacgtccggttttatgttcttgatgaaggaaatcaattctccaatccgcttcacagacaaagtgggacgggcggcgtagcccttagaacgctgtatggtcaccagctttgtcttttcatttaaggctgccgcaatgccttcatagtcaaaggaaccgtcctcaaacagatccacctggcggtaggacaccccgtattccttaagggatccaacagaatccctgattccgatgacttcttccagggtgtcatatggcttgcccacaggcgacaaaagctcgtccccgggacgcaggttgcctgacagggccacatgaagggcgtgggtgccgctcatgagctgagggcgcacaagggcgctctcaccgtggaatacgctggcgtacacatcctccagggtatcacgtcccaggtcattgtaaccgtagccggtggtggctgcaaagtggatgtcgctgacacggttgtcctgcattcccttgatgaccttcatctgattgtattccgccaccgcatcaatggcctcaaagcgttccttcagcgcttgttccgtttctgccgcaaattccctgacttcccgtctgatgccaaggctttcgtacatctggttcatttcatttatatccattggtttttaatcctccgttttccggtttgttattgtagcacgattccctgcttttcgcaatcctctaatatccgctccaggacctttgaaacatcccctccgaactcaggaagattcaaaaaacgcacctctctctcccgtttgaaccaggtaagctggcgttttgcaaaatgtcttgtatcgcgcttcagtatatatacagcctcctccaggctgcatctgccctccagatagtccagaatctccttatatcccagtccctgcatggaggtatggcctctccggcagcccatatccctcaatgccttaacttcctccaccagtccctgctccaccatcaggtctaccctgcggtcaattctctcatagagcagggcccggtccgtgttcagaacatagtagaggaaattgtagggggattccttctcccgctcctgctggttatggagggaaatcttctcccctgtctggcggtagtattcaatggcccggatgacacgctttatattgttggcatggatttgagcggctgcctccgggtccgcctggcggagcatggcgtgaaggacctggggcgccctctctccctcccgctcagccagggcttccagttccctgcggacagggctgctgtcctcattttccttaaaatcaatatcgtacagcagggcctgtatataaaaaccggttcctccggcaatgacagggatgcggccgtggctgtaaatctccctcagggcctccttggccatctgctggaaggtgaccacgttaaaggactcctgtggctccagcacgtcaatgagataatggggaacgccgtccatttccatgggagtcaccttggctgagccgatatccatgtgtctgtatacctgcatggaatccgcgctgatgatttccccgccaacggcctttgccagccggatggaaagggcggtctttcccactgccgtgggtcctgtgaggacaatgagcggctgcttcatatgataaaggctcctttcagacaatgcgtttaaattttttctccagctcatacttgctcatggagatgatggtaggcctgccgtgggggcaggcatagggattttccaggtccagaagctggtcaatgagcacattggcctcctggaaggacatggtatgatgtcctttaactgctgccttgcaggacatggaggccaccttttcatagataatgtccgggttatgtacagacatatcctccgaaagcccgtcgatcatctctgtcagcagttccttcttggcaatggaaaacaggttggcaggcacaccgcgcaccgcgtattccctgccgccaaagggttctatctcaaaaccgattcctgtgaaataatccatgtatttcttcaggagaagttcttcattcatgttcagtgtgaggataatgggcgggtccaccatctgcatgtcatactgccgcgtctttaaggactttacggtattctcgtagagcaccttttcatgagcggcatgctggtcaataatgaacagctgttcgttgtactccaccatccagtaggtgtcaaacagctggccgataagcttgtgcttcaatctggccttggggtccaaaagctttccgtcaaacaggtccagctgttccggctcagcggagctgccggcggattggccggaagcggtatcaggtgtgtcagaatttacggtaccagcacctttttttacaccggcacctttttctgtatccgtatccatacggtcctcccggaccggaagctctgtcttgcaggttcccttcagagaattaagggcggccggtgagactggacggttttcctgttctttttttctctccttcagccagtcaggcatcagctcattgacaaaggagggcctgggcggggctgactgggcgtaaacagaaccggaggaggatgggccgccggggcgcacctggccggagtttgcagcggttttccggcttaagttctcccgtctgcgcacctcgaagggctccgggcggggagccagcttctctgccagctgcctggcctccttttcctgcctggcctccaggcttacctggggaatcagctccttgtgggccagggcattgctgacagcccttaacactgcattatacaccttctccccatcggcaaaacgcagttccatttttgtgggatgcacattcacgtccagggtatccggctcaatatggaaatgcagcatggtaaaggggtacttgtgctgcatcatatagggtttatatgcctcctcaatggccttggatatgatggtgctcttgatataacggccattgatgaaataattctcgtaattccggttggacctggctatgaccggcttgcctgtaaatccggtgactgtaatccagtcctcgttgatttccaccgggagaaggtttcccgcaatctcccgtccgaatacagtatatatcaggtccttcaggttgtggtttcctgaggtatagagcttattttgattgttctgtatgaatcggatggaaatatccgggtgggaaagggcaatcttttccaccagggccgccacatgggctccctccgtcatgggagtcttaaggaatttcttccgggcaggcgtgttgtaaaacaggctgcgggcaatgatggtggttccctcaggggcgcctatttcatccagtcccttctcaaccccgccttcaatctggtaccgggaaccggtaaggctgtcccctgtctttgtaatcagctccacctgggccacggccgctatactggccagggcctcgccgcgaaagcccagggaggatatggtgaacaaatcctccactgttttgattttacttgtggcgtggcgcaggaatgccaggggaatctcttccttcgggatgccccatccgttgtcagtgacgcgaatcatggaacagccgccgtccttgatttccacggttacggcggtggcatgggcgtcgatggcgttttccagcagctccttcactacggaagccggccgttcaatgacctcgccggccgcaattttattgatagtgctttggtctaaaacagttatgttggccatattaaagttcctttctgtctgttctcagccaaaaagtatctctaaaagccggccccaatcttagatgccagggccggctttatcagttgctttttacaggtatataatccctgacctgtatccatttcaccgacttgccggaacgctctgagagaaacgtccgcaggccgtttatgcagacagcgcccatctgtctcttatccagcagatagccgccgtggtccatggtatacaacaccaggcagcgcggtgtctcgcatatgtgggatatctggctgtatgcgtggactgccctgcctccggaagttctgaaataattccggtaaaattcataggtcactgtaaggggttctccatttttgacaagaaaacgcttccatgcagtgtccagctgcatccggttggaacggtctgaattaaagaggccgctgcggatgaagcccggtcccccggtgcggaccagatacgccagaatcaggaagataatggcagcggtaagggagtgaaaaatgccaaatatgcgcaggagaatggaaattacgcagccggcgcggcatgtccataagagagccgttaaggtaagccacacccaaaggggtgcagacggattcaaatgtttttccacggaaaccatatggtacaatgattcctggttcatcttcatgtcaaccgtatagcagacggactgcgtctcagtctgccggtcttctgttatcatatcagattccttttccttgctgcaccggcggccttccgccccaatactgcattacataatgcagtacggtttatcccctctctttatatacaacaaaaccagataaaacacaagccctttttacagaaccatgggccttgccgggtcaagggcattacaaatccataagcccctccagaacatggacctccatgcgcatctgttccaggtccacattcaggatacagtcaccgatggcgggaagcatcagttcctttccgtccttcatggcaaccacatacacatcattagcccctgtttccagcacatccttaagggttcccagttccacgccctggtctgataccacggcgagtccaatcagatccgtgatgaagtactcatcgggcgcaaggtccacggcctgctccctggtaatcagcaggtccctggacttatatttttctatttcatttatattgtcatatcccttgaatttgaggatgaccatgttcttgaagaatttcacatgttcgatttccatgggaatatgctcttttccagtgtcaaggatgacttccttcagctctttgaaacgtttggcgtcatccgtggtggggaatacctttacttcccctttgattccgtggggggaggttatgactcccactctcagcatgttttccatacacctgtcacctttctgtggcaataaatgaaccgccagccctgcggccagcggtcctcaacttgtctgcttactgaatctcaacgattactttcttgtcttccttggacgcagcggccttgacaacggaacggattgcctttgcaatcctgccctgcttgccgatgaccttgcccatgtcggcgggggacaccttaagctcaatcagggtatcctcgcccttcattgattcggtaacaacaacttcttctgggttatcgaccagtgctttcgcaatcacttcgactaattccttcatcttaacacctcattttcaactactgaatgccggcgatttttaagagctttcctacggtctcagttggctgtgcacctgttgctaaccacttcttagctgcttcctcgtcaaatttgatgacacttggttccctggttgggtcataagtgccgatttcctcgatgaacttgccatcccttggggatctggaatcagcaactacgattctatagaaaggagccttcttctgtcccattcttcttaatctcatctttactgccatgtgatttcacctccttgtgaattgttcttatattagacatacaggagtattcctgtttgactagcctggtctgcggattgtattgtcagcattcagtgtcctaaaagggcatcttcatcttgccgcccagcagtcctcccagaccgccgaatccgccttttcgcttgccgccgcccataaggcccggcatctgcttcattattttcttcatctggtcgaactgttttaccagacggttgacctcgctgacctccacgccggcgccttttgcaatgcgctgttttctggaagggtttatgaggtttggattggccctctcctcttttgtcatggagagaatgatggactctactctgtgcatggatttctcaccttcatccatatccgcaccggacagctggtttcccatgcccggcatcatggaaaggatacttcccataccgcccatctttttaatctgctgcatctgggtcaggaagtcattgtaatcgaattccgccttgcgcagcttctggctcagctccttggcctgttcctcatccacctcggcagccgccttctcaatcagggactggatatcgcccattcccaggattctggaagccattctgtccgggtagaactgttccaggtcggacagcttctcgcccataccaacatatagaatcggtttacctgtgactgcgcggatggaaagggccgcaccgcctctggtatcgccatccagctttgtgaggatgacaccgtcaatacctatcttatcgttaaatgtaccggccacattcaccgcgtcctggccggtcatggcgtccaccaccagtatggtctggcagacatccagattgtcctttatctccaccagctcatccatcatggtttcatcgatgtggagacgtcccgccgtatccagaatgaccacgttaaggccgtttttggatgcgtgttccacggctgccttggcaatgtccacaggcttgtttttgtttcccatggaaaataccggaatgcctacccggtcgccgttaatctgcagctgctctatggcagccggccggtagatgtcgcaggcagctaacaggggcttacgtccctttgccttcatcttggctgcaatcttggccgtggtcgtggtcttgcctgcgccctggagaccagccatcatgatgatgctgatttcgctggagggctttaaggaaatctcagtcgtctcggaacccatgagctttaccagctcctcggtcacgattttgatgacggtctgtcccggtgtcaggcttccgaatacgtcctcgcccactgcccgttcctgaacggacccgatgaactgctttaccacgcggaagcttacatctgcttccagaagcgccatctttacttcctttaatgcggcttttacatcggcttctgaaagacggcctttaccgcgaaggtttttgaatacattttgtaatttatcggataagctttcaaaagccatgaaataatcctcctaaggctgcactgcgtttaatgaatcactcatcaaagtgtgctggtgatttccgcggacaatcgccgaatctggtcaatgagggccatatccctggtgcgtatgcattcatcagagagacgttccagctcaccggccatctccttgactttcatgaacttggctaccagatgaagcttggcctcataatcctttagtatcttgtcgcatctttttatcaaatcgtggacaccctgacggctgattccctgctctcccgctatctcgctgggggaaaggtcaccgaacaccacgtcctcgtataccctgcgctgatgttctgtcagcagttctccataaaaatcatataacaaaccctgctccacaatcttttccatttcaaccacctgtgctatcatacacgatagaaaaaggattgtcaagcatttttacttgacaatccaaaaaaatcagcagcaagatacatcaacaaaatatgacagcggcagtggtacacattttcctgtcactggtaatagacatttttgtttacggatatcagcagtatggcagcgataaagcatcctataataagcgttcggtatatccctgaaaaacgggcgccaacctggctgtcaatgaggcagaacaggatactgccaaacatcaggatggtgggaagcagtacaaaaaacaggtattttcccttggaaacactgtggggaggcggcgtgcaccgcaccagcttcacaaggggaagcctggcaaggcggaagctgggaccgaatgtaaaggaagcctgataagcgattccctccagccggaccagggcacaggtggattccagccggatcgtctcataattcagattccttctggccgcgtaaagggctgtctcccgcgcaaagtcttccggcgtcaggatttccccctcaggttcaaaatagatgtactgggagtggagttccttctgaaacatcttccagtctttcctgatatcctccagccaggtgttttcgccatcttcacggctgatttcctccagacattgttccacgaccgagggtttcagcgtctgctgttcttccagtctggcacacatctgttccagcttctttaactgagacatttccccatcaatccggtccaggcgcatgcgcatcagttcgcttaaggtcagcctaccctcaaaaaatccgcggatatcccggatggggattcccagctgccgcagaaaacggatttccagcagacgctctatatcttcctcgctgtaatccctgtaacggtttccctccgtgcgccggggagccagaagttcctcgctctcatagtaacgtatattcttccggtccaggcctgaacgtatttcagcttctttcatcttcataagcccatctcctttctgtttatgatttgattataaggtatccagcagctgtacagtcaagggaaattgtatataaaaagggaaaactgtttagttttccctttcaaagtcaatcatccgtcctgataatatctttacacctatagattcaggaatgattcctattatcggtcgcagagaggcttgtaattctcttccttcataatgcttgtataggcaggacggataatcttatccatattaatcaattcctcaatgcggtgtgcgctccatcccacaattctggcaattgcaaagattggcgtgaacatttcttccgggatatccagcatgctgtatacaaatccgctgtagaagtccacattggcactgacgcccttgtagattctgcgttcctcggtaataaccttggggcccagctcctcaatcatggaatagagggcaaattcttccatacggcctttttcctctgaaagctggcgcacaaagcgtttgaaaatctcggcacgggggtctgacttggaatacactgcatggcccattccatagataaggcccttgcggtcaaatgcctctttgtgaagcagtttcttcagataggattccacctcatccctgtccgttacatcctttacctcgttccttaaattctgcatcatttccactaccttgatgttggctccgccgtgcttgggtccctttaaggaggccagggccgcggagatgacggaatatgtatctgtgcctgaggatgtaaccacatgggtggtgaaggtggagttgttgccgccgccatgctccatatgcaggattaacgccaaatccagcacatgggcttccacctgtgagtatttcatgtcgggcctcagaaggcggagcagattctccgctgtagagagattttcgtccgggcggtgaatgtacatgctgccgtccctctcataatgattataggcatggtagccatacacagccagcatgggcattacgctgataagcatcatgcactgtctgagtacattgggaacggtaatatcccaggccttctcgtcataggaagccagggtaagaatacttttgcttaaggatatcatcatatcttttgtcggtgctttcattactacatcacggacaaaatttgtgggaagtgtacggctgaatgccaggctttctttaaattttgtaagctgatctgcattaggaagttctccgaacagaagcaggtatgcaatttcttcaaaaccatatcggttttctctcactaccccgccaatcaaatcatagatattataacctctgtaaaatagttttccttcgcagggaacctttactccatccactactttgttggcttcgattttggacaccttcgtcagacccgctaccacaccgtttccgtttttatcacggagcccccgcttcacgtcgtacttttcatacagctccaaatcaatcctctcatcactcagacaaatgtctgaccactggctcaagttgtccataaattcctttgtttcaatcatgcagaacctctcctttcgactgtttgattttctcttataaaattcctcctgtaaaagtggtattcttactattttattccattttaagatattttgcaaactttttttgtataaatataagttcaaaacaggaaagattcctgctctatcacctgtttttcagcacagattttgtctatgaggggctgaaggagcggttcggtggtccgctgcaatttttccagtttactggtttctatgggttcaccgtatgccttatactgttcatgcgtttgtgtatccatgagatacggctgcagatttgggaagatgcgtttcttaatatattgaaatatcttgactcctccataatccaagtcgccggtgtggagataggtcgtcccgcaggaagtccggatgctggacagaacccgttccagatgaatctcgcattttcggataatacattccagcggtgcgttcataaaaggcttcccatccctttctcataatgacgttctctgtcatgtatccgcaaactcattcctatcttcttcatcctgcatcagctccacaaagcgctcccgttcaaattcctggatggatatggacttcttgttggggtttgcaaagacaaaggtcttgtccacgttttccacgtaattctggattttgtcattggtggcactgatgatggcctggaacccaagtccgcggatcaattcaatacagctggccaccttctccccgtccatcttggaaaacgcttcgtccagtactaccagccgtatggttggattgcgctccaccttagagggaagattgatgcggtaggcctgggcaaaactggccagaagggccacatacagcgggttttggccttctccgcctgaattcttcttaatcatcttgctcagccggattttgataacctcatcctgattctgtatgagctgctgcatgtcaaaggacaggtaggtgcggtaatctgaatacttatccatgttccgcctggcctcgtccatctgatccggggcggcgttttccggggggataaaaatgctgatgagttcattcatcaaatccccatactgcttttcatgctcaatggtaaacaggtccatctggttttcataggaataattgaggtccgccggattgatatccagtgaatcatccataaacatatcgtagaatcggccgtcaggtcctttgttgcggccaataataaactggtacttgtcctttccgaaatccaggcggctgatgatgcggttcagctcatccttgcggataagagcctcccggattgcgctgcggattttatacatgaagtcatcccggaaatgctctaccgcggatttggcctgttccgtggctttctgcttgtattcttccagattgtcgcatttcagggcgcttaaaaggtgatcatagacagcgttgtctctggcgtttaccgggaaattgcggttgggatacgtccggatatagctggtcctgaccgtcagaagctcctgaaaggctgcttccctggcctcagacagcttgctgcacctgacagtataggtttccttttccctgtcatagcgcaccgtatccctggaggacagataggctgtcagttcattgtcatagtcaggattttgcgttaactcccgttcctttgacgtgagaacggactggctgtcaatggacttattccggtatccttctatctcccgctctttatcgcggatgagtacattcaggctgtccctctccctctttttgccgtcgcagagcgtgatgaccgcctggcggtcccgttctaaccggtctacattttgctcctttaaaagctccagcttctgtatcagctttttcttttcacgctccttggccttatagctgtttatgtccttcagccagtccatgtattccgggggctcagccgagagccagggaagcgccaggattctatgggcttccctgaccgtctcctccaatggatttttcttttcatccagggccgccagctcctgctccaaaagacggatacgtctccggacgctgtccttgccgatataggcgaatttagtatagttatccgggttgatgtgctgcaggcggaaggtgtggtagagcatgcagccgctggtgatgccgatacggcattcccttaattcatctatggtatcgcacttgatgaccctgccaaggagcaggtccatatagggccttaagtaggattccctcacagtcacttcctctgagagggcgcctttttgtacctggggctggttctgggatgccttttccgtgtccagcacagccacgttgaagtattcctttttatccagttccccgtagatttccagggcggtcttggcgtattttggagctaccaccagatttaatttgttatttcccagatagccctccactgcgctgcgccactcatctctctttacatccagcagatcggccagcacatgcacatccacgctcttacccgtttcctccaggaggcggcgctggatgtagctccgggcattctccaggtatttgggataggctttgctgccggaacgaagcttttccagttcatcccttgtctgcttttcctgctttttgagctccctgagtgcggaagacgcctcctgatgctgcttttccgtgtctgagcgcatggatgccatggattttttcaggcgttccaatgtctccagatcaatggtgcggttttcaaattcctctatatcccaaagagtctggttggaggtgatgtcctcttcttcccagcgctttaaggcatctgtggcctgctgccacctggcctcgctttttcccagctgttccagcagttcattcaggctcttaagctggtttttaagttcctcgtacccagtggaggcaatacggcgcagcagctcgtcgctctgccgggtcagttctccaatctgttcgtccacggagcttctggcctggatctgcttttccagatcctctcccgccagctttgccttgtgggccagggtgcggacctctgactgaagctgcagaatctccagtttctgcacaaaataggaagattttttgagctgctgttccttgtcagcatagctttggaatcggtcctcaatctgttttaaggattggatttccgcacatgtatcctcaattttctttctcatgcggccgtactgcatgacgctttcctgcatgtcctcgatatggatgtcctgttccatgcagatgtattccttaacaaaatcctccagcttgatgttcattctgaacgggatggcccgcttgaagagaagggggaatttttcggagtccaggccgcccaggtaggaatcatagagtatccggcggaaacgctcgttgtgggaggtcaggaaatactcctccctgttgtaattggcctgaagatagtcctctatttccacgatggacatggtccgcttcccgcccctgtagccattgtcccacatggggcctttgtgccagaagaagcggcgggatatctcattggtggcggtctccacatcaaagacaattcccacgcactggcactggcccgtatcgcttcgtttcagctccaacacaatggtggaggagaagttctggttgcgcagataggaaaattcgttgttgtcgccgatatttaccatacctcttaggtattcaatcaggctgcggtcagagtcatcggcagcagccttgttgaagaagccccggccgtccgtattggcgtagagcacaatctgcatggcgtctatgacagtggacttgccgctgccggaatgtccggtgaaaaagttgatttcatcattaaaggacagagtccttttcgttatatagtgccagttattcaaacatatcctggaaagggcgagaaaacgatcatttgctattttctgttccatggttctccttcctctgctgtcatatcatccgcgtcttcttcctccagttcggccttcagctggactccgctgtcatccgtatcctcatcaaaggaggaaagaagctggcgcacatcgtctcccatgagcaccacgttgatgcagggatatattatcatgcggctttcactttttaagtcctctaacagatccaaaggttcaatgacctggtattttttcagaagggtaactgcccggcgtatatccgtgagggcgggctgcttcttaaacagcctgtaatttcccagcttttcgtggatttcacgcagggatgtatagacgttgacactggtggaaacgctttccatctgttcatcgtatatcagcttcagcaccagcaggtacagggtggcgagacggggcagcttgtcacccaccacattttcaccctggatgtacatgacgcccatctggctgttttcacgcagctccactccgctgatggcaaaataattcttgatgaattccaggtgtttgctgcatacccggtagtctctgttgtactggaatcttccggtacgcttgtcatatttatgttccagtatgaacgtctggcgccataggaggcggatgatttccgtcacttccgactgctccgagtgcatcagattgtcgtagtaagggatgctgtttccggtgtatccggccgcgggcgcgatgtctgccacgctgttttccaattccatgttttccactatcttgtcctcctgacaaataccagccgcggataggtatagccgccgctgtgtaccatttccgaatcttcctcttccaccttataagggctctttctcctggtggaatagtcataggccagtatcagtttttcaaagtcctggtctgaatgtatggtttgttcgtccaccaccattttcccgtctgccatgctgccttctataaatgcttcaatctccttctggctgtaacggttcctgaccttgttcaggttcaggacttcctccatggacagttcctcggattcttcctcatcctttaactgttccgtgaaatccgccttggtcttacggcgtttgtacagggatttttctgacagtatggtcatctgggacagattcatcccggcgcttacagctgtcagttcatcttccggacagccgtattccgacatatggttcagaagtttgattacaagccccttcatgttgtcctcctggtttaacaggtaattgaggcgtgtgaccgttgccttgacataacgggtgtgctccttgtccatgttggagatgcggtgttcgatatcgtcaaacccacgctccaggtggtccagcttctctacaatatcgtattctgtcaggggcgtcttcttctgccccctggttgaagccgcgcttttggcgcacattttattgatccaggaactgtcctcccgcatggcggctatccaggatttaatgtctgtcttgtagagataaaaattgtctgaggtctttaatatatgatattttttattgacaatttccgtcacgtatccttccaggtgctcctttaacagggtaccgtaattcttctgttccagcaggctgctaaaaaacttatccatattgtgaagcatgtcctgaagggacttgttcagttttttcgtgtttaccagagccgtatttaacaggctgacgctggagcgggggtcgtttttcagagaaaatagaatggcatagacattctggatataaacctgggtctcgtcctcatcgtcgttagacaaacgggaaaatgcctcaatcatcaccgcggcgtaatccgggatgacgatgttgaccgtcatgctggcgtaatcatccaccttgcggagccagccggtccgcagcagccagttaagaaccctggtggcaggcggttccagttcatcccagtcatcctcggtctcatcctgccatatgacatattttttccgggagaaatattcacttaaaagctggatgcagacttccctgctgaggaaataattgctgtactcgtactcctcgttgattttaagaagggcttctatgtaagtagaccggttaacagagcggaacaggctccagaaccggtctggtatttcattcatcagtatcatttacaaacctccgtatttccatatcattatagcaggaattaccggaagtgacaatcagaaatcatttcgcccttaccttaccctgactccagaagccgggctttcagatactccagaagaaccggctggatgtccggataggtccagttatcgggcggttccctaaacagcgctatgcgggctatctcatacccttcaggcatgggtcccagttctgtgatattgccgtaatagagcattccgtagtttatgacaggagtgtccgtgtcttccaaggtctcacggaccgaatatgcgcttaacggcgtcagggtgaagcaggctgccccggtctcttcgtataattccctgcgggccgtgtgttctatcgtttcacctgcttccctgcggcctccgggacactcgtaggtatcccgttccctgtgctggcagaacagccatttgccccggtatctggacaggatgactgcaaacttcagcagggaatcatccactgtgttgtgaaattcgacgtttatcatgtagtcgtctcctcggttttacaataaacgtgcatacagctctctgaattctttctccgaaagtcttaactctgtttcgttataataaggagtaccatctctgattccgaattcaagagcagtaggtccgtctaagtagtaagctttatatgcgtagttaatcggttctgcctgtcggacataatctactaaagcctttgctgcctttctggatttttcgtccgacataccaccaactgcggggcctgagcctgcacagtaaatatttaagtaaacttcttccacttcttccgatgccgccagaatgcagtatgaaaaaagattctccagattttccgtcttatagattggttgaccaaataacgctttgattttaccgcatatgagagaaaactgatttccataatctgaaaagctttcaataaaattacatagtttactgctatctgttaatttttccatgtttttcactgattgaaatgtgtacggcattttatttagtcatttcttttctgctttacggataatattttttatcccatgccttatcaagagtgctaacgcattgctacacaacaagctcttgacaaatcctgttctaaaaaatgcagaataagtttcatattacctgcctttggttccggtgtcacgcaacaatctgttgcacccttataatataaggcgttttccatgtcggagcaaagctatttcaaatgttcctcgcatctaagcatccgttcctcgtagccgtccagtttccagtccagccttgccaggacctggttcagctcattgattcgggccacaatccgctcccgctgttccagaagaaggttttttctggcctggatggtggaggttccctgacggaacaatgtcacatattccagcaatgtctccacagaaacccctgcactgcgcatgcacttgatatactccacccaatggcagtcatcctcggaataattgcggatgccgccggacgtgcggcccacatggggaagaaggccgattcgctcatagtagcgcagtgtatcggccgatatgtcatattgtctgcttacctctgctatggtcaaaccttcatcagctcctttacactgtaatctagtataacccacactaaacaccttactgtttcgctggtctgattttccgatagcacaggtgcaaaatactcagcgtagaacccactacgcctccgtttttgcacctgcactctcaaaaaatcatcctcaccgaaccagcaaggcatttaacgtgggtcatactagtatgaatcgatacatctgagttcatatccgcggctgccaaggccaagagaatgggcggcctccacggtgtgtatcccgttccgggattctattcgctctatcagagcagcctttccgccatcctcagaagcgtataccgcatccacgcacgcctggtccagggccacagggtcagtggaggcgaaaatgccgatgtcccccatttccggatcatgtggatgggcgtcgcagtcgcagtccacggataaacggttggccacattgatgtacactatattttcccggcccatatagtccatgacggagcggtcagcgtccgccatggattccaggaatgaatcgtggtcagctgtgaatacatcctcaaacctggtgctggtgccggaagaatgaatccatatcttgccgtaagaagatgccaggccaatggacatgttctttaaggctccgccaaagcctcccatggcatggcccttgaaatgagaaagcatgagcatggaatcatagctttgaagatgggagcccacatagttttccgtcagatgaaaaccgcctgttaccggaaggggcatgtggtcctcctcgtccaggatatcacagggtgcaatggctgtgaacccatggtcccgcatggtttcccagtgagccttggaagtgttccttcttccctcataggcagtgttgcactcaacaatggtacccttaagttcctgtacaaggttcctgataagttctggttgcagaaagttacggccacccggttcacctgtggagatcttcaccgcaacgctgccgggtaacgagatacccaatgcatggtacatccggaccaggctttccggtgtgatttcctttgtcatgtaaacaatagacataatgattgtcctccttgaaatgttgtcaggctgtagtccgcatatcggcagtctgcatttcagcagttcttacagactgtggtgcagaatgtccaggacaggtaaaacccctgacagatggcctgttggggtgataaatcctggatataatgagagtctacaacttaaagtcaactccaagtcaagagggattgtgtagaatgtttgtaaattgttcttaaaatgtccaaaaacctaaaatgtcgtaaagcgcaatttaatcccgaaatcagtccccgccttttcaatatcccggataacggtctggttcggcttaaaggccacgaaatcagtgtaaatgacatcctgaatgcggcttctgtccaggtcctctaacggtaaggatacgatttttctgattcatcgtagaatgtgaccgtgtttttctcctcatcaagcttataggcaagcgccgttagtttccagtgtttccacgctgccggtcactaccctgaccccatagatacggttatcataatcactcatgtgaacaaacccgtcaatgggatccatggccgtgatatcgtgagtatccttttccgtacccgtgagcataatccagtgcactgctccgcttttccgccttacctttacaatgggatacattttttcttccagcaggcggtcgatgctctcactggctgtaccgcagtccagccggaccctggcatagggcaatgcctgttccagttccttccacacaatggagccctggccgttgtaaacattattttcattgaaaacctgatttagttcccccggtgaaaaactgtgtattccctgagcggtcagggatgcggcgatacagctggtcaggcatccggaacttcccatggtgtccttggaaatgcccagaggactgctgctccagcgcgtatcacgctgggaatatgaggtatagattttattaattcatctgttgttggttccatataaaatcgttgctcctccttacgatttattacgattcccgtaccaggtttcccactgttcacggcttccgtaatacacgttcatgtcaatgaaggtctcttctccttcatatcccgccagacgctggcggttggtatactgccacagcagccatggttttccgtctgtgcggggctttgtctttacgttgcgaatccagaggggatattggtcaaatcttccgcggatgtacaggttccaggattcctccgtggcatagatgacaggaaccatcccgtactgtctttccagaccttcaagcaggaccgcaagctccagccccacatccgccgggtttggaggattggtagccttgtctccgtaaaactccacgtcaactgccggcggaagcatcccgtccccggggggcagacactgaatgaaatgcgccagctggtcttttccgctgctgtcaaagctgaaaaaatggtatgctcccacagccagtcctgacagggccgccccggaccagttctgagaaaatttctcatctatatggaagctgccctccgtggctttgatgtaagcaaaatcaatatcctgctgccccagtactacccagtcaatttctccctgataatgggacacatccacaccgcgcaccggataacgggttctggaaggattatttaagagaatccgtccgttccatatcagataagccatgatgccggcagcaaaggctgccaaaactaccagcgcggccaatatgcggagccatttgtatctgcgtttcattttccatcctgctttccggaacctgtatccgtatattttatcaaaaaacaatgcgctatttattatcatgtttcagcaaggcgggattattcccacttccggctttctgcgcgtcacacgccttttacgcagtcacgcccttgtctgaagccgccttatcagcctccgtatccttagccaaaagcttgcggatgccttcaaaggcaacaatcacgcccagaatcagaagaagaattgcgaacaccagctgaagggcattgccgaatacaaactggtttgacagggctgatacgaggtcctttattttgagagtcagggccgtaaaggtgacgcccagcatgatgaccatgggcccccagagcataacgccctgtctgtgggtctttttcaagaatacggcgcaggcaatcagggccagtgcggaaagcagctggttggcagagccgaacagcggccagatgcttgcataacctgccctggataacgcatagcagagagccagtgtcagtatggtggagaagtatttgtttgtcagcaccttgttcagggaactctgctttgccggatcaatatcatcattggtgaaaaattcctggaaagcaatacggcccacacgtgccactgaatccaggctggtcaatgcaaatgcggaaatggacagcgttatcagcgtatagctgatggaatccggcattcccagtgcggtaaggaacatggcgatggccttagcaaatacctggggaggcgtaccggtgggaaggccttcgctggtagccagcgcacccacagcaatcagcgcggtgatggccagaaggctctctaacagcatggcgccaaaggataccggcagcatgttcttttcatttttaatctgcttgctggctgttccggaggataccagagcatggaagccggatacggcgccgcaggcaattgtcacgaacagggttggaaacagataggaaatatttccctttgcatctgtaaatacaaatgatgtaaaggagggaaggttgatggccggattataaacacatattcccagaaccgcaccgataatcatggccagcagcaggtaactgttcagataatccctgggctgaagcagggcccataccggagtcacgcaggcaacaatcacatacaggaatacgaaaatgagccatgcgctctggggcacatagacgggaaacgccagtccaagcgcaacagccagcacaagaaggccgatggcaaccagggtgtttaccagtttgctgcattttccatacttcaggaagcatcccaatacaaccgcaaatgcaatgaataaaagagatgtggtggcaacggctccgttagcagcgattctctcgccggtggcggcatcaaaaccattgaatgtgcctgccacaatgtcagcaaaggcagccactaccaggatggagaacagccaggtaaataaaaggaacagccttttaccaagcttgccgatatagacctcgattatgtagcctatggaacggcccttgttcttgacggaagcatacatggcggcaaaatcctgaaccgcgccaaagaatacgcctcccagaagaatccacagcatgacgggcagccagccgaacatggcggcctggatgggtccgttgatggggcctgctcccgcaatggaggcaaactggtggccgaataccacattggtatcagccggcacatagtccacaccgtcctccatctcataggccggtgtctttgcatcggggtcaacgccccatttctttgccagatatctgccgtaaagcaaataggcaccgcctaataccactacggctaaaagcatcatcactaaaccattcatcatcaagtctcctcacatatataaagtaggtttcaaagagtttgttcaggcaatgcctcaacatcatgccgcagcatcctgccctgaaaagaataatgaccgggcccgtaaaaagaaaaggtccctgcaccttgcgatgcagagacgaatcaatccgcgttaccactctgtttgccgccccgttaaaagaacagccccttaagttcctgctgctctcagtcagccggaatctttgttaacggaaagaaacccgtccatccctactatcctccctctcaggaaaggggttcaaaacagaagctgttgggtgaggccatgattcctcgcgcgcgcccttccaccagccgggctgctctctgtgccggaatctgaaaccatgacatgtcccagtcattgcttttctcaagtatcaaactcttgatgtcaagaagtttaccactttaacacagaaaaatcaatgatattttaacactttttttatactttatttatatattgttcataactacaggttatacagatgccggtccctccgtcttacgggatatggcgtctttcacaatggcctgcaccaatccctgtatatggtatgttccggcagtgatatctgcttttgttccatgcttttttagctcttctgccgttatatccccgatgcatacaagctttgtatgccctgacctttgtcctggttttataaccaggccacttgaaaggtaagcccttaccccggatgcgctggcaaaggtaatgtaatcaaatccctcttcctccggagatttggcatccgccggaccttctgtatcctccgtactctgctcattcaccggccggccttccacctggtaaagagcaatatcatcataaaccagtccggcttcttccagtattctggtaagaaccggggagccgcccctggaacgggcaatcaggatacggtcgctgccggtaaggacggatgccagcccctgcgccagtgcctctgcgcagaaggaatccggcatatagtctgcgtggaaaccgaaattcgccagttccctgccggtgccgtcgccgataacggcaaatttcacatgaccgagtgagcggtaatccctgccggcctgctgcattccctgaaagaacaggcgcacgccgttggcgctggtaaatatcagccatgtatacgcggacaggttcctgtaagcttcctgcatggcaggatctgctgcatgggaaatcacttccatttccaggattgggcgggcctctcctccctcctgttccagggcatgcccaaggctgtctgtaaaatgccgtgtgccaatcatgccgattctgtatccggccagaggaccggtaaaactgcatttcatatcgcagttcatatgaaaggaggcggtttcgcccacaacaattacggccggggtgccgatcccctcctccatgaccttggcgtgaatccctgaaagcggcgcccggactaccttctggtccggcagcgtgcccttttcaatgacagccgcaggcgtgtccggggccaatcctcccccaatcagcctggctgtaatggccggaagctgtcccaggcccattaagaacaccagagtgcccggcagggacccgtatgtttcaaactcaggggggagacagtcctttccgtccagggtgtggcctgtaatcacatggaagcttctgcttaccccccggtgggttacgggtatcccggcgcattccgggaccgctatggcggatgtcacgccgggaacggtttcgtagggaataccgtgggcttcaagtgcctggatttcctcgccgccccgcccgaacacaaagggatccccgccctttaaacgaaccactgtaagccctgaaagggccagttccaccagaaccgcgtttatctcatcctgtttcatggagtgatgcccggcctgcttgcccacatagattttgcggcatgcggagggcacccattccaggaaccgtctggatgccagatggtcatagaccagggcgccgcaggcgctaagaagcgcccggcccttcagggtcatcagagacgggtctcccggacctgcgcctaccagatataccattcccgtattctccatatcacatcaatcctttccatgcttctaacgccagtttttccatatcctcccgggacgtaccgccggtcatatgaatcctctttacctctcccctgcggctgctgatgccccatacctccaactgcccattatcagggacagagtagatgccgataggctcatgacatccggcatccagcagtttaaggactctccgctccagttccaggcacaggcgtccgtgggcatggtccatggcctgggtgaggctgtgagccatggttcctgcttttgcctccaccgccatcaggccctggcctccggcaggtatgaattcttccggattgagaaaggtatattcgtaggtatcctgttcaagcagtcccagtctctttaatccggcagccgccaggatgatgcagtcaaagttcccctcttccagttttctgagccgggtatgcacattgcccctgagggtgctgcattctgtcccggcagcccccggccacagtgttttacacatcaacccggcctgaagctgccgccttgggctggaggtgccgatgcggaccatgctctccggctgaatctcatggcctctcatggtgaccagcacatctctcgggtcttcccgcccggataccgctgcaatggtcagtccttcggccagctccatgggaaggtccttggcgctgtggaccgccaggtctatgaccccttcctgtatggcctgctcgaactcagatacaaagacacccttgcccccgaattcctgtaaaggcttatccagtatccgatcgcccagggtatcctttgtcacgatttccacctgtatgccaggacagacctgccttaattcatcagctacaagctgtgtctgaatcagcgccagcgcgctttttcttgttccaatgcggatgatatcattcatgtttctgttccagctttctgtttattatgatttgcgcctgttcctgtgtgagacagccgttatggctgagcccttcctccgccagctcgtaaaacagggctgaacggacctggggcgagtcagggaacatgtctttgaccgtctttctgtaagcccccagccgggctgtcagctctcccaggctgtccggcattgcggaccggattctggccttcagatacctggctatgacagggctcatgccgccggtagaaattcccaccaccacaggaccgtcccgcacaatggacgggaagataaaggaacattcctccttcacatccaccacatttacaggaatccttttcgaacggcacagggcggatatcctgctgttaaggccaggctcagacgtggccgcaatgacaaagtcggccccgtccaggtccctgtccccgaattcttttcttgtcagcttaaggacgtccgtgtatgcattgtcttgggccagcgcatccagaccagggcacatgtccggggataccacctcgatgaccgctccatagggaagcagatcccgcacctttctcaaggccacgccgcctccgcccgcaatcagccatttcattccctcaatatctgcaaaaaacggaaaatatgccatgaagtttgctcctcccattatatccccgggcatatccgtccgggcgaaagtaccgaaaaagacgcagacagccattcacgaaacctcctgtctgcgtctctttcctgctatttttatctgtcacataatgcggatcagcgcatgtcatgctgctttcttcgttcatctaacaggcgctcgaaatcctcttccgtataacctatatccgccagacgctgtctgcgcttttccctgaggatgcgctggcgttcccgctccgctgcctgccgtcttttaaaccagaatactccgccgcctgcaagcagtgccagaaccaggaccgcgccgccgcctatgagcactgcccttggaagcgtaaagccggtatttccctcctgtccgtcctctgcaggccggctctccggtggagtgtccccgccgggctcagagggagttgcgtttactgcctgcgcactggagctgtaaatccacgcgtccccaaccctgcgctcgttataggtgtagaccagtctggccacggcttcctggggatggccctcaggcaaatccgtctcaagtgtcttgttcgcatctgtaaactgcgcgtcattggggatggtgatgactgctccgctgtcaatggagagttccgaaggattatatgtctccgccccaatggttacaggcgcgctgcctgtgacgtattcggtttcattgtcagctatgttcacattcttgaattttgcaaagcagaaatccagaatggtctttgtatccgaatagtgggttttctgggtactcttaagagtgactgcaatctggcctctgccctcccgtctggcgtaggtgacaagggtctgtccggcctgggatgtccagccggtcttacctgcaatggcgtcgggataatagttggaatcgtctgacagcagcatcttgtgctcgatggaaaatgtccgcccattgggattgttggcagtggccggtatggaagaagtcctggctgaggcaatctccagcacggtggggttctggaaacaggccctggctatgatggccatgtcgtaggccgtggtgcgctgggtgtcgtcgttcaaaccggagggattggcaaaatggctttcattacagccaagctcctcaatcctctggttcatcatgtccacaaaagcctgtctgctgcccgccacatactccgccagggcgttggccgactggttggatgactggagcagcatggcgtagagacattggcggacgcttaatacatccccttcctccaggttgaacttgttgccggccccggattccacgttgtatatggcgtcatgggaaaatgtaaccggcgcgtccaggtcattggtattttcaataaccacaagagctgtcagcagtttggtgatactggccggaatcttttgctcgtgtatgttctgggcaaacagcacggccccggaatccatatccatgacaatgcctgcctctgactgaacccctgtatctatgggccagtccggttttgcaaaggcagtgatggcggtcattgaaaagaccatgattagacttgtgattatgtaggatatacgacgcataattacctcttctttttcatcaaaataaaacagcctatccatgattatattttaataaagggccgctgtcaatgaattaaaatttctaattgtatctcgttgaaaaactaattagccatgccatgggaattgcggtatactttaactggcacaccctggaaacagtgccattattttatacatcattggaggaaccgaacttatggaaagcttttcgagaatgctcaatgcccagatggtacttctggcttacctggctgtggggatgtactgcatgaaggaggggctcattgaccgggacaccaagaaaaaactggtggacatcatacttaaaatcaccctgccgtgcatgatttttaattccttcaacaagcccctgactccggaggtgctgatacagacagccttaatcatggtggtggctgttgccatctccatcctctcctttctgttgggaaaagttatatataataaatacccgcaaaagaaaaagagtatccttcaatactgtactttggtcaataattcggggtttttaggaatgcctatggtgtcggcggtatatggaagcgacggtctttttgccgcatccatctttatcattcccaaccgcatcttcatgtggaccgcgggcctggccatgttcactaccgctgatttcaggacaaaatgcaggaatatccttctgaatccctgtatcgtcaccgtatttctgggcattgtccgcaggatgaccggatatccggttccgggctttttagacgaggccgttgccaatataggagccgtcaccacaccgctttccatgatggtgattggcaccatgctcatcggtgttccgtggaaaaaacttctggatccaagtattttttatctggcttttgtgcgtctcatagcgctgcccttagtggccctgtttatattgaacctcattcacgcggagcccatgctggcaggtgtctcccttatccttacaggtatgcctgcgggaagcaccagtgctcttctggcagccaaatacggggcggatgaggattacgcctcccgctgtattgtcaccaccaccatcatgtccctggcaaccataccggttctgatgctgcttttatgagaatacagatgaaacgaacagggcgggacaacaatataaatccgttccctgtttgcaacggccagtcccgtgttatcgtgaacatatttgctgagctggggcgtgggggtcgtgggctcctcgaagtaaaagatatcatatttttttgctgtcaggccaatctgagtggatgactgtgcgtctgtaaaggagtgattttcaataataatgtccacatcaggcccaatcgcttcacggacagccttcagcctggacgattaaaagaatcgggaaattagaaaccacgctgctccttgtctcaaagctgcatccctatgctgcccgcaagacaattgcctggaaaaacaacgcggtacattcaaatgcctgtgtcaagtttttaaatactgtactggattattataaaaatgtgtgatttacagaaaacagtatgagcagacagcggggaaattctgtctgctcaagtatatgcgatatacagcttgccgtcttacatttcagctggtccttcaagtcctgtcagaccgaacattccgctgaatactcagaatccgctgtcgttgaaacagctgaatgcaatggcgtttcagacaggctctagcgtaccaggcagggtttcttggaattaaacttccaacccggaatcagatactgcatgacaacggagtcatccctgccgcccagacagttgtccagatacagctgatgggctttctttacctgttccaggtccacatcaatgccaagtcccggtttcctgggaacttccacacagccgtttacaatctgcaggggttccttggtcaggcgctccagtccctcctgccaaatccagtgggtatccagcgcattatattcacccggcacggctgctcccacctgggtaaacatggccagcgaaatatcaaaatggttgttggaatggctgccccatgtatatccgaaatcatggcacatctgggcaacccttacagaaccgttcatggtccagaaatgggggtcggccagaataatatccactgcctgggattccagggaatgacccacctctctccagtctgtcgctatcatgttggtagctgtggggaatccggtacggcggcggaactcgctcataatttcacggcccgaataaacgccctcggccccgcacgggtcctcacaataggtcaggatgccctgcataccttttacatactccacggcttcctccaggagccatcctccgttgggatccaggtctattcttgcatccggaaactccttctttaaggcgcggattacttccatttcttcattccccgcaaggactccgccctttaacttgaaatcctggaacccgtatttctcctttgtggctctggcaaaagccacaatcttgtctgcggtgagcgcctcctcatggcggattctgtaccactggcagtccgcgtccggttcggcatcgtatgccaggtccgtcttattgcggtcccccacaaagaacaggtagcccagcattcttaccttgtccctctgctgtccatcgcccagcagctcacatacaggaacatccagatgttttcccagcaaatccagacagggcgcctcaatggctgtgataacatgaactccggtcctcaggtcaaaggtctgatttcctctcacgtcctcctcgccttttgaatccaggtatctctttatctttaacagagtgcttttatactcgccaatcctggttccttccaccatcggaatgcattcctccagggctttggtaatcttttggccgccaggaacctcacccacgcccatctcgccgttatccgcgtaaagaaccaccacattccttgtgaaataaggtgcgtgggcgccgctcaggttcagctccatgcaatcctttcctgctaccggatacacttccatctttgtgattacaggtgttgtcataatcattgctctccttttatttgataggatttgattgaatttcgttgttgttatctttattttataagagaatgtacacttagtcaaattacttaaatttattttcattcttagaaaaacttattgttttcggctgcccggcttttgggaaaaccgtgtttatatgaaggccaatacggaaaaatgttcaaaaaaagcggcagtaaaaactgccgcttccgatttgtttaccccaacattatattgattataacatgcagctacggagggttccagtggttgggattaaattaatgaatggatttttcatcaggttatcggcgcaggattaaagatgcacaaatcattgtgcagtttatacttctccgcataactctgcttcctgccgctggccacatccacaatctcatggaacagctgggttccaatgtcctggatggtggcgtctccggtggcaatggggcctgcgtttacatcaatcaggtcctgccactgcatcttcatgtcatttctggaacacaccttgatgaccggggcaatggccaggccgtaaggagttcctcttcctgtcatgaacacctgaagtccgatgccgctggccagctggcagggtccgcagactatgtcgctagccggtgtggcagcgtaaatcagcccctttttggaaggtttttccgccggagacagtacttccacgatgggggaggtgccggacttggcaatggagcccatggccttctccacgatgttggagagcccgccctttttgttgcccggagtggggttggcgctgcggtccacctggccgttttccaggtaatggtcataccatttcatctcggctgccagcttcttccccacttcctcgctgacgcagcgctctcccagaaggtacacgccgtcccttacctccgtcacctcggaaaacaggaccgtggcgccgccctttaccagcatgtccgcggcatagcctgcgctggggttggccgtgacgccggaaaaggcatcgctgcccccgcactgcatgccaatcagaagttcggaaaggggcagtgtctggcgccttctccggttaagcctggccagcttcctgtccgccatctccatcagggaatttaccatatcgtcaaagccctttttctcctgcagtatgatgacattgtcaggggaaatatccgcctggtcaaggagcatttccacggtgaacttttcacagcccagccccacggccatcagctccccgccaaaattgggatgcttggccaggtttctcagggcgcggatgggtacctttgcctcgggggcattgatggccacaccgcagccgtaagcatggttgatggggacgatgtcgtccacattgggatatttcggaagcagctcgctcttcatcctggccacggctacattcagaacgcctgtgacacactggaccgtggtgctgatacccagtatgttgcgggttccggcatatcctccatttggatttacatacccctcccaggtgtccacaggcggttttggcagatctgtcaccagattggcggcaaatttcatctcgtccactgagggcggggtgggaagctccagcatcttttcgttaatccactgcccttttccgatggggttaatggcatatcccaagaccacgccgtaccggataatcttaccgccttccggtatgtcgcacagggctatcttatgggcctgcgggatgtcctgcttcgcgcgcacgccgtccatgaccagggttccggccggaatgtcattgaccgcaatggccacgttgtctttatcgctgattttaatgtataaaggactgctcatttttgtctcctcctgctgtgattggattcaaaatctatggtatttttcattggcttaattatatcaatggggtactcataagtaaaattattaaatttaagctttctcttagaactattaatagttctgttttgctttcaagggctgtgtttctttgctataataacgttaaagaaccggcaaaaaactggttcagcgcaaggaggccagccaattggacacaaaatacctgagttatatattgaccatagccaaaaaggagaacatgacaaaagccgcggaggaactgtttgtatcccagtccactctgagccagtatctgtccaagctggagagcgaactgggcaccccgctcttttaccggagcaagggcaggcttactcccacagcagcaggcaggctctatattgacgcggcggaaaaggtcatggccattaaggacaatctttatcagaacatacaaaacctggacaaccggggacacatcaccattggagtcacctcccagtttgccctcaggatgctgacagagctgattccgcctttcaaatccagattcccggatgtgaccatcgagatatccgaaaccaatgttccctcccttacccagcttattctggaggaaaacattgactgcggcatcatggctctcaataccgtggagcccttttcgcgggaccaggcccatgtgctcagacgggaggaaatattctttgccatccccagaacccatccctactgcaggattaatccggggcggcccgttaccatacctgagtttgccaggtatttcagcgaggataatatactgatgtccaagaggggctccactctccgctgtctgaccgaccagattatcgaggccgccggctggattcccagtaccatgtgcgagaccaacagcatcatagccacccgcagcatggtggctatgggaatcggcgtcaccttcataggagcctcctgtgccatagacagggagcatgtatcttactatccgctggagcccaggctgtaccgtttgaacgcctttgtgaccagaaagaactgggtcatgaaccggccggaaagcactctctgccacgatatcctccactacttctccaatcaggggtaaacgtcatggccccggaacagatggattctgtccggggccatgttttccgtccctgctgcctgaaagcctggattagatggttattttgctaaatcgtctgcaatctccttgatttcagtgtagattctctcgtcgtttttctcggagtcggctgcgcttaagtaatatggctccatttccaccttcttgatggcttcctgggcctccggatcggatgtcatctcttttaccaggttgtcataccatgcgattacgctgtcaggtgtttcctttggaaagtagaaggagaactcgcagttgggatatactaggtccacgccctgctctttcagggttgggatatccttgatcaggtcatatctatcctctgtgggagcgcccagacaaacaaactgtcctgcttccagataatccttgcagttgatgtacgcacccggcatcaggtccacctgtccggacagcatggctgccaccttgtcggagttggatcccacgtccaccaagtccagatcgattcccgctgccttctcaaatgccagcagctcgtagtaagtgtaggcgcccacctcggtacatgccttcagctgtccgggagctgccttggctgcctcgatgaagtcgtccagggtcttgtatttatccgggtttgcatacatctgctgtgcaggatcaagtgcaaatgtgggtcctaatttaaatgcggtgtaattataatccgttacaccggaaatgttggctacgtttaccagattgtggccgtacaggaaggtatggccgtccggcgcagcggaaagcacctggttggcagccacggagccggcagcgccgtttgcgtttacgacgatgaaatcagcgcctgtcatcttcttggcaaactccgcgaatacacgggcggaaaggtcagtattgccgcctgcgccagccgggaccacaatggaaaccgttgtgccgggggcccagtcagatgcctgcgcctctgtatctgccgcggctgccggggcgcctgtctgggcagcggtggtatcagctgccgcagcagcagtggtatttgaagttcctcctccacatgcagtcatgctcagtgccatagctgctgccatcattcctgctaaccatctttttttcataagttattactctccttttctgataacccatccgggtcttttgtttagttgataatacccctctatatgtatcccgccccggattcggctgattttccggaaatcccggttcagccgattggggccggaatcatatataaattttcttactcatcccgctttgaaacatgctgcattttccttgccctggtcatcctccattctttataaatggaccagaccacaacggctatggcaacgaagaagaatacatcgaatataggccgcttgaagaacgcgccaaaagatttatactgcataataccgcgccgcagataggtttccaccatctcgcctatcaggaaacaaagcacaaagggcgtggtgggaagtttgaacttgtgatataagtaacccacggctccgaataagatgatggactgtacatcgaagatacggttgttggtggcataggcgcccacacagcacagaaccagaataagaggcatcaggatgtgcttgggtatcttgagcagctggacaaatcccttgattccaaagaactcgattatcagcatgaaaagactgcacagcatgcaggccgcaaatataccgtacaccacatctgcgtttttgacaaaaagcaatgggcctgctgaaagaccgtgaatcaggaaaccgcctaacatcatggctgtaacaccgtctcccggtatgcccagtaccagcaggggaatcatagccccgccgatggtggcgttattggcggtctctgtggcaacgataccgtcagggcagcctttgccgaattcatcgggatgtttggacatgttcttggcggtcacataggaaagcatgccggacgtgctgccgccaatgccgggcaggatgccgattcctgttcctatcagtgcggaacggatggcgttgggaatctgatatacaaactccttccatgtaaatccaaagcctttgatgggcttcatcttcatggcttccaccttgccgtttcccatgctctcagccgttatcaggatctcggagatagcgaaaataccaataagggttggaagggtgtcaaatccggccatcagtgagctgcttccaaaggtaaacctgggagttccgtcaatgggcgccatgccgaccagggcaaatataagccccagcataccggccagcactccctttaccatggaaccggaggccagtaccgccaccattgtcagcgcaaagaatgaaatgccgaagttctcagccggtgtgaacttcagggcaatgtctgccagcagcggcgcgcagaaggtgagcaccaggaaggagaacacggaacccaggaaagagaatacaatgccgtatccaagggccttgccggcttcccccttctttgccatggggtgtccgtcaaaacaggttgcgatggatgacgcggttcccggcatgttgagcagaatggctgaaatcagaccccctgagataccgcctatgtacacggccaccagcaggttcatgcccatggaaggcgtcatgctgaaggtcagaggcaggaacaatgccactgccatggctgctgagagtcccggaatggaaccgaatattattcccactgccacgcctgccgccatgagcagtaaggatgtggggcggcagatgcttacaaaggcaccgcccaaagatgctaatgcgttcatggtctacctcctataagttgatggtaaagatacctgcaggcagcacaatcttgaatccgtagcggaacaagaaaaataccacgaaggtaaacaatacgtcagtgatcagcagctgaatgacatccttttttcctctccgttcttccggcgccaggataaacatctggacgggaagatagaccagagtgctgatgatgaagcccacggacttgagcacgaacacatagaccaggataatgataaagcttgtgagcaccctcttgtagtcggccttttccggtccctcggcctcagcctgggccacatatattttcatgtttttgatattgaggaataccagggctgctgccagcacaaaggtcatgacaccaatgcacatgggcataaaatcaggtccgatatccatgaccgttgacttgggaagcatcttggccataaccaacatggctgcggataataacatgaagaatactccgacaatgatatccccatactttttaataaacattctctctacccctttttttctatgatttgcctggatttatctgaccagcgcaggctttttgca

SEQ ID NO: 488 - DNA, 2579689 bp, Enterocloster clostridioformis (residues 1,289,846-2,579,689 of 2,579,689)
  source 1..2579689: mol_type = genomic DNA
gtcgtatttccagccgggaatcagatactgcatggccatggcatcatctctttcatgggaaggaaggcggttgtaacgcccattggcctccatgaccttgtccatgtcgatggtaacacccatacccggcttatccggtacctgaagatacccgtttacaatcttcggcgtatcctttaacagattctgtccgtcctgccaaatccagtgtgtgtcaagtgcagtgggagttccgggagcagccgctgccacatgggcaaatgcggtgagggtgatgtcaaagtggttattggaatggctgccccaggtaagaccccagtcgtttaaaatctgggccatacggacgcttcccccgaatccccagaagtgaggatctgccaggacaatatccacggatttaagggccgcggcatgatagaactgacgccagtccgttgctatcatgttggtggccacaggcagatttaccgcatttttgaattccgccatcacctcccggctggaatagcctgcttccgggccgcatgggtcctccacataagtaagcactccctccatgggctggcagatgcggatggcctcctccaggctccaggccccgttggggtcaatgttaatccgcccctcaggaaatacttttttcaatgcgcgcatagcttccatctcttcctctcccctgaggaccccgccttttaacttgaagtttctgaagccgtatttttcgtttaatacctgcgcctgctccacgatgcgctcaggcgtcagcatttcctgccgtctgagacgaaaccaggcatcgctgcttcctgtttcgtcgatatagggaagggccggcgcagccttttccttatcacttacatagaacagataccccagggtctccacctggtccctctgttttccgtcgcccagaagttcacacatgggcaaatccagatactggcccagaaggtccagaagggcgcattcgactgcccattcagctttgacaacgaatttcagcttgctgatatccaatgtctggataccctccccatcgtcctccgccgcccgtgtactgctcttgtggatggtatccaggatattcctgtatctgcccactggctgtcccactaccagagggatgcagctgttcagcgcctcgcatgtgtaatccccgccgtgaatctcgccaatgcccgtgtgaccggagctgtcccttaagatgaccaggttcctggtgaaccagggcgcatgggctccgctcaatgtcatcagcatgctgtcatatccggctacgggaatgacctgcatatcagtaacaacaggtgtgcctttgtgttccatcatatcgtttgtcccctttttcttgttttatgcataatgcctacacgcaaattgagttcacccgtattcggatgttattatgtatgttttttgctgtataattgtaatttatgtacgcattataacaggaacgactttcggattccaattgttaatattaatcgtgtcaataagaatctttaattgttgttcttacgttttcttaatgtgattcgccccggctcccttgcttcctaatgttctcttaacacatgccaagtataaacgacagggttaatcaagtaaagtttataaaacttatctttactcttaataaatcttatagttaatcttgcactctttccctttatgggttaaaataaatacatcgggatggaaaaaggagaataccatggacacacggcagattgaatatattttaaaaattgcggaagaaaacaacattacccatgcggctaataagctgttcatcacccagtccgctttgaaccagcagctcattaaactggaacaggagttaggcactcccctgttccaccgttcccgcaccaactggcatctgacggaggccggggaaatttacatccggaatgccaaggaaattatgaggctgaagcgggaaacctaccagaccatccacgacctgtctgacggcaaatgcggccatctctccgtgggctttacggcaggtcgcggcatcaatatgtttacaaaggtatacggcaccttccaccagctctatcccaacgtcatcatcgagccccaggagggcattgtaaagcatcttcagaagatgatatccattggcggcctggacattgccttcctgacgcttacggacaaggacaggaccgacgatatctatgaacccatatacgaggaagaactgtatctggttattcccgccggacatccgctggcaagcgtggcgcctgaggagggggaggactatgccaccctggatatccgaaggctccagtacgagccctttgtgctcatggaccgccattccaccatgaacaccatgctgaaccgtattttctcggaggcaggctttacaccccaggtcctctttgagacaggcaataaccataccattatctccatgatacgggccaacatgtgctgcggaatcctgccctactactatgtgaaggacatggatcaggacttctgctgtttccatcttccctcccgccccacatggcagtttacggccagctacaaaaaaggccgctatctcagccgccccgcacgcagcttcatcgatctgatgaaggaacaatggggagaccggacaacggccttacatacagattaagactttataaggctggagccatacataggcaggcgccatacatagacaggcgctttaaatcagccctgcctgtttcatctctgacttgattctgtccagtacagggccttcaggcgtggccaggtttggcttatagggaagtccgacggagcgtccccttaagttagccatatcctttgcggccacagggaagctggctccatccatggaaagccggaccggattcagcttgaactgggcttccagggaccttttcaggtctccggccacatatttattgtatacatccactataagctcaggcatgaaattggctgccgtgcacacgcctcccactgccccatggcacatggaagcgtatagcagggtgtccttaccgccaaacaccttgaatcccacatcccttgtcctgcggataaattcagctgtctgggttatatcgccgctggtatccttcattcccacgatattgggaacctcatgagccaggcgctccaccagctttccggacatggtatagttcacccttcccggattgttgtacagaagcacaggggtctccggcacacattccgctatggtcttaaaatgaagataaagctcatcctctgttggtttcagaaacatgggctgcagcacggatatgcctgctgccccgttgtccgctgccatcttagccagacggcagcatttttttgtgctgattgcgccaatgccgaaataaacgggcacacgccccgctgcctggtcaatcatgattttaagtccgcgctccatctcatcctcttcaatgacatagaattcgccgttgcttccaaaggccaggatgcctgacacccctccttcaatcacatagttcacctgttcccgcagcttcgcctcgtcaataaactcattttcattaatgggggtgagaatgggtacaataacacccttgataaaatctgtattcataacgcttctcctttatatccgggtccaggtccgattatgattcaactgtagtattggcaatcttttcgtaatacttgacaatgcttgcgtggtcttccttctcataaccgtcagccttcaatccctgcatgatttccataagctgtcctgttaagggaaccggagagctgattgcatgcgcggcgttcagcgcattgttcaaatccttgatgtgaagctcaatgcggaatcccggcttaaagttcctgcccagcatcatgggtgccttcgcgtccatgacagtggatccggcaagtccgccgcggatggcctgatataccagctcagggtcggttcccgccttctttgcgaaggtaagggcctcagatacggcagcaatgttcacagcaaccacaatctggtttgccagctttgccacgttgccggaacccagctcgcctacgtataccacggaaccggccattaccatgagcatgtcataatacttgtcaaacagctcttttttgccgcctaccatgacagacagtgtcccgtcgatggcctttggctctccgccggaaacaggagcatccagcatgtcaatgccctttttcgccagctcagcgccgatggccttgctctcggtcgggtcaatggagctcatgtcaatcagtactgttcccggttttgcgccgtctgcaacaccgttttcgcccagcacggcagcgcgtacatggggagagttgggaaccatggtgatgactaccccgcactgctctgctacttccctgccgcttgcggcagatacagctccgcattccgtcacttccttcaccgcgtccttgttaaaatcaaaaacaaccagctcataacctgcttttaataaattcttgctcattggcttacccatgattcctaatccgataaaacctactttcatatcatttcctcgcctttcttagaaacatttttagttacatctttttacaaacatcttttcccgtcagcttgtttttctgacctatgcccacattatagctgtacccttccttccttacaattggcattgtaaatgaaaaaggcagcttgttttatacaagccgcctatgatttcaaatcgcatttcacatttgaaacaatcgtttcatttatagttcatttatagttcgatattgtattttttcatctttctccacagggttgccttgctgattcccaggcaggcagcggcgcgctctctgctgccgccctgggctgccagggccaggcgtatctgccgttcctcctcacaggcaaccggcccccctatcccctgtccgtccggcatcatccggaccggagcagaagaaggaaacagttcccgcagcagcttcctcaccagaatctcgtcaatgctccgcttttcagctgtcagtatcagccgctttaagaatgtctccagctggagaaggtttccctgccacggatatgctttcaggcactgcatcccaccctgggtcaccacatggtaacgggaatattggtcgcaggcttccctgaccgtgtccctgattgcctgttccagatcctccggccgttcccgaaggggcggcacccgaaggaccagtcccgtgaagagataatacaggtcctgccggaaccctcctgaaaaagcaagatgccccaggtcctccggtgtgaggatgctggaggcgataacgcggatatgaaagcccatggtcctggcaaaatccctgctgcctgtcttatagcgaatgagctggtacaggccgtattggctttttaaggacagtgtctccacatcctccagatacagggtaccgccttctgccaaaaacacggctcccttgtttccaaagagcatttcctcctgctcctcccgggcaaggcctgcgcaggaaagggccaggaaggggccttcactgcaaagccctgtattgtggatgctctcagccagcgctctccgctccgtgccggtttcacccaaaagcagcacaggctgttccgactgggagtaaagcctggccaggtggacgcactccttcatggcccctgactcctggcgtatacttgaaaaatttctcctggcaatcaggccctgaaccctgtttgctccatcccgttgcgggcgccgttcaccgcggctctgctgctttaccttgtggcaggtaagaatggccccctctgtctcatttcccacgcggacaggggccagaatggcgaagatggaggtctttccggcctgcatgaaggaggaatagctctcctcctttccctccaggacctgtgaaagcttatccctgtctatgtcggagaatacctgggtaatgtgccggcctgccacctgttcaccgtcagctcccagtatgtcccgcattaccggattcaccgtggtgatgactcctttccggtccatgttcaccaccccgttgaaggaatagtccagaagtgtctcaatctgggcattgctcctcttctctgcgcccatggcaaaatccaggctctcagccatggaaaaggcagtgcgcagggaatcctcggtgatcgacaggaacagggacgggatatccgcctccttggcagtctcaaccgctatgtcccctccaatcataaggtcagcgccatcctccacggcttccatggctttttcctttaacccggaaccattggcggcaaaataagtgcgcagctttatgtcatagatcgtctcaaagtatgacatgtcgcagaacatattctgaaagcccaccacagcaatgattggcctggccttttttactatctgcctggcctttaccaccaggagagccatctcctgggccgtggccacgatttccaccacaggcacatccgtatactgcttgatgagggatgcctgaaggcccctggcaatgatgatgtccgccccggcggcaatggaattcctggcctccaccaccgtattctctgtctggatgacacgcatctgcgcaatggcatacttcttttcctgaagaatgttgtgggccaggtagagcatttcctcccttggcaccagaagaacgattttccccatgccgctttcccctttttacatgactacttgtccagacgtgcctttaaaagctccagccctgccagtatcacgccgcccagtatgaaaaacaggatactgaaggtggagggactcatgggcgccttgggcacatccagggtggtgggccccatggtgatggcatagagggagcctgtcatcaggccgatgatggtgtaaatggtctgggagcggaaccgctccaggcacatcttgatgattttaataattcccacaatacctgtgacgatgcccagaccaaataccatcaggatggggaaatagtccatattcatgtgcaggaattccttcacagcacctatgatgggcacatagagcccgaatatgagaaggagcgtggaacctgagatgcccggaagcaccatggcggtaatggcgatcatggcagtgaagaacacgtacaccaccagtcccagtgacagatgctccactgatacacggattccctcgccgcctgagggattaaaataggtgatgcaaaataccagcaggactcccataagggtgaataccgtatttccgtacctgcctttaagcacttccctttcctcacggatcaccatgggaatggcgaataaggtcagtccaagaaaaagggagctgatccggtagatgtgagcctcaaagaggctggacagaatcagcaccgacatgcagaagccgatgacccatcccactcccagctttaccagaaacaaaaaggcagttttccttctgccgttgtcccggcccatcaggtcgttcagggattcaataaatgtatcgtaaaaacccagtaaaaaggcaatggttcctccggatacccccggaacgctgtccgccagggccatgcagaaacctcttattccatttaaaagcacgtaatcttcctcctgtcattttgccgccgcccggctgttccggatggcagtatgattttctctgaataattatacaggaattgacagaaaattcaagcacggtttttcactgccgtttcttttgccctttccctgttccgccattttcttcctttcctttcatcttttcctatggtatcatagtagtaatttttctgtctgattgacagcggcaatgataaggacgccggacgcaaggtgcgccagattccggaccagggtgctctttcccgtgctttcgctccctaggaccagcacacgccgggcatagtaatcccggcacacagagggaatgtaatcccagtgtcccagcgcccagcactgtctcgtactggcgaatgtgggaaagattcccggagccgcggattacggttgcaagccccacatcagggtgaatacgattatgacaggtccgatggcggatacaattcggatcattttctcaaatccagccagatatgcacacaggaccatggccgccttcctaccgcagaaaaaggtaaagtgattgaaatttgcctcatccctgcgtcccccgtgtgtctgtacctgattctgttatattatagcagaaggcacataaaaaatatagcattgaataccatacttattccccctggagcgcgtcatatccctgctctccggtgcggaccttcaccacattttccacatcgtacacgaaaatctttccgtctccgatattgcctgtgtaaagagcctttctggctgtctctattacatcctccaccggtaccttgctcaccaccacttccagcttcatctttggaagaagggccgcctcctccaccttgatgccgcgatagtaatttacatggcccttttgcgtaccgcagcccatgacctgggtgatggtcatgccggtgacgcccaggtccgtaagcgcatccttaagagcggtgaacctggcctggttaaatatcatcactaccttggacagcttgacattggcggacaccggctttgccgatggataatgctccaccggaacagctttttcaacagagacaccggcgtccgccgccccctcctttgcctttcccataaataccattggcatgaaatccgcataggagctggccagattgtgttccgtcacatccagtccctttgtctcctcctcctcactggccctaaggccgatggtatgcttcagcacattgaaggtgatgatcatggttacgcttacccacaggataacgcagacaacacctaaaagctgtattcccaggaaggagaaaccgcctccgtatacaaggcctccgtccaccgcaaagacgccggtgagaagggtgcccgcggccccgcacatgccgtggactccgatggcgcctaccggatcgtctatcttacacaccttgtcaatgaattcaattccgaataccaccacaaaggctgctatgagtccgataaaaaacgcgcctgccgggctgaccatatcgcagccggccgtgattgccaccaggccagccagggaaccgttcaatgtcatggagatatccggctttccatagcggagccaggtgataaccatggtggccgcggtggctgtggcagccgccaggttggtggtcacaaagatattgccggcggaatatacagccgcgtcgctgtccatggcaacagtggaacagccgttaaaaccaaaccagcagaaccacaggatgaacacgccaagggcgcccagggtgaggctgtgacccagaatcgcgttgggctttccgtcctctgtgtactttccgatacgcggtcccagtaccttggccccaatcagggccgcaaccccgccgcacatatggacggcagtggagcccgcgaaatcgtgaaatcccatccgggccagccatccgccgccccaaatccagtgtcccgacacgggatagaccactgcgctgattacggcgctgtagatacagtaggaaatgaacttggtgcgctctgccatggctcccgacacaatggttgccgccgtggcacagaacacagtctggaaaatcaggtaggcgggaaggggaacgcctgccggaaggattccggaataatccccccgcaccagcggatcaaatcctccaatgaaggcccctgcacccccgaacatgatgccgaagcctgtaagccagaacaaaggggtaccaatggcaaaatccatcaggttcttcatgataatgtttcctgcgttcttcgctcttgtaaaacctgtctccaccatggcaaagcctgcctgcatgaagaaaaccagggccgcgcctaacaggacccaaattgtgtttaccgctgaaaattccataatgcattcctccttgagggtttatatttgatggggatgcgcattcatgggggaatacgcagaaagaggtgcattgcccgcccggtacctggccgcggcaatacacctctttgtgtatctgttatctacgcagaaaacagagaaagcgccggatgtctaagcaccggcgcttttctttatgtggcttattatagtgtccgctttccgaaaagtcaatgacaaattaagattttgtaaataaactataaaaaagcaataaaataatggaaagtttcggcagatttccgctgccctcctaatccgtttaactgcggctcgcagccttccatctggctttctggccttcaaactgctcgttcagccagtccacgccttttgctatgccgtccgcgtcaaaggacaggatttgttgttccttttcttcctcaggagtggcatcataaccatatggctcaggccaaatggtaacacccaggcgcggtccgtcctcaccttccaaatccagcttttccatacgaaaacgcataccgttgtgacttcctgtaaatttctcttttttcaggaaattaatgggcatgaaattcttcagctccagcatatgctaacctcttttaaactacttttcatactggctcagctccaccaggtgcatggtcaaatccgtgatggtgtcatcgtccacctgggccgccgtataaagtgtgtacttggtacttccccactcccaggaggccagacggccgccgctgtccgtggttttaatcaggacttccaggctggtttcaccgtaatcatagttccgggaaatggcctcatccttaaagcgctcgaaaatccccgcaaagtcctctgccgtatccgaggccctgtaggtgtatggcacaccgtccagagagaaccgggcatccgccacctcctggttgatgatgaaaaagctggtatcctcagccccctctggcagcaccatatggactcctatggcctcaaaggccaggacatcctttacctccgccatgggatttggcagttcccgggttgcagttcctgactcagcccttgtccctgtctccgccggagcggatgtctctgcctcagaagtcttaacaggctcctttttgccgccgcagcccgcggccagaagggccgtaagcgctacggccagcagaataccctttctgcccaaaagccttttggttcgattcatgtaattcctccttccatctgcccatgcacaggcatcactgccctttctgcatgggtgctaccgtctcacaatattcctgcagcgccctgtgcagctgtccctgtgaagcctcgtcgcacagcactactatcttgtcccctgccctgagcactgtatcccctctgggcacaaactcggcctccccgcgcataagggacaccaccagagaggtccttggccaggcgatagctgaaatcttctttccctcggctgcgcttccatggtaaatcatgccttccaccagcaccttttcccctgtaagcgtgaccttcttgtccgggttctgctttgccagaaggcggtgaagaagctggtcgtacaccggtgcgcagtgaaccatgtccggaaccagataggctgccagtgaaaccatggacagggtcagcagatgagaaaaggatcctgtcatttcactaatcagtatgatgcctgtaatcggcgcccgcacaatggctgagaaatagcccgccatgcccaggatgatgaaattccccaccaggccgctcagagagggactgacaaggagggccacattgtaatatatggttcctatgatggctcccatcaccagcagaggcaggaagatacctcccggcgccccggagccgaagcttatcatactgaaggcaaatttgaccgccagcagcaggcacagggcgccaagcgccatctcacccgtggacagttcctccaccagggcatgacctccgcccagcacgctgcggtatgtaaatccaaatacgcctgccagcagaaagggaatcagaagcttcaccgtgccccagggaatttttccgtataaatcctgggttttggacagagtggtattataaaccacacccatggctcccatgatcacgcccagaaccagcacatgaccgtaggtgcccaggggcatcatatgggtgatgtgaaaggaaaataccggcgtcaggccgaatacattcctggatacaaaatccgaagtaatggatgccgccatggaggaaaggagaagctccggtgaaaaatgcttatgtacctcctccagggaaaacagtatacctgcgatgggcgcattgaaggcggccgacaatccggcgctggctccgcaggtaatgagaagcttttcctctgtttttacccgtttggcggccctggagaacccctttgccgtcatggctcccagctgaatgctggggccttcgcgtcccagggacaatccgcatcccagggatataatgccgcctcccagcttggcaagcagcacacgccaccacttctcatcaatttccccaatgatttccccttcaatctggggaatgccgctgcctgatatcagggaatcccatttaaggagaagggacaccacacatgcggcggcggccagaatcagaatccataccggcacaaaccaggtatggctcctgccatagtccagtatcatgttcagcagtatatccgcggaacctatgagatagcggaaggccaccaccacggcgcctgccagggcgcccaccactaccccctctaaaattaactcataacgaaaactccggtaacggttaatggtatgagtaaccgtatgttcttccggctgcataacgtttccccctgtatcttgtctggtctgatgcctacatctcactgtaggtgcccttgaactttacaagcttgggacggtatcccgcgctggtaagggcagatacaatctgattcttatggtctgttccaaatgcctccatggtgatgcgcagctccacggcagcattgcggttgatactgataaactgattgtgctccagcttgatgatattgccctgctccttagcgagaagggcggataccctggccagctctcccggcttgtcgggaaggagcacggacacggtaaatacacgatccctctcaatcaggccgtgctgtacaatggaggacatggtgatgacatccatattgccgccgcttaagatggatacaatcttctttttctgtacgttcagatgctttagggcagccacggtcaggaggccggaattctccacaatcatcttatggttttctaccatgtcaaggaaagccacaatcagctcgctgtcctctatggcgatgataccgtccacattttcctgtatgtaagggaacagcttttcgccgggacgcttcactgccgtaccgtccgcaatggtgttcacctggggaagtcccaccacctttccctccttaagggatgcctgcatacagttggcgcctgcgggctccacgccaatgaccttaattttcggattcagaagcttggccagagtggaaacgccggtacagagaccgcctccgccgatgggaaccaggatatagtccacggtgggaagctccttgataatttccattgcaatggtgccctgccccgtagccacgtccagatcgtcaaagggatgtacaaaggtatatccgaactcgtccgccagcttatatgcgtgatcgcaggcctcgtcaaacacatccccctccagcaccacgtcggcgccgtagctcttggtgcggttcaccttcataagaggcgtggtggtgggcatgaccacggtggccttcacaccggccagcttggccgcgtaggccacaccctgggcatggttgccggccgacgctgtaatcagacccttggacttttcctcctcggtcagggtgtgtatcttatagtaggcgcccctcaccttataggctcccgtgtactgcatgttctccggcttgaaaaataccttgtttcctgtccgggcagagaaatactcactgtataccagttttgtctctgtggtcacatccttcacaagctcggaggcctcctcaaatttttccaatgtcagttcttccatatctttgtccttctttcccttgcttttattctatactatagcacgtcaatgtattgtttcaatccacgttcggttatttctgcacatggaacagggcattgacaaaatcatccgcattgaatttctgcaggtcgtctatcttctccccgattccaatgtattttacaggaattcccagctcggactgaatggccacggcaatgccgcctttggctgtgccgtccagtttagtcaggataatgcctgtgatgtcggccacctccataaactggcgggcctgggccagggcattctgtcccgtggtgccgtctaacaccaccagagtctccctgtaggcatccggatattccttgtcaatgatccggttgattttcttaagctcttccatcagattcttcttattgtgaagccttccggccgtatcacagataagcacgtccgccttcctggacttggctgccgccaccgcgtcatagataacagccgccgggtcagacccctcctgctgcgctataagctccactccggcccgtgaggcccattcagtcagctgctcaatggcagccgcccgaaaggtatccgccgccgccagtatgaccctgcgtccgtcgtccttaagctgtccggccagcttgcccacggatgtggtcttgcccactccgttgacaccgatgaccagaaccacggacttcctgtgctcgaattcgtatgcgttttcgcccaggtccatctgctcctttatgctgttgattaaaagctccttgcactcctccggttcccggatgtgctgctccttcaccttcttacgcaaatcctccacaatggacatggtggtctggattcccaaatctcccatgataagggtctcctctatctcctcatagaaatcatcgtcaatggcggaaaaaccactgaaaatggaatctatccctgacacgatattgctgcgggttttggccaggccctctaccaggcgcccgaaaaagcccttctttccctctgccataaatcattctcctttttgtgtcttacatattaggtcttatatacaatcaatatatatgaatcatcatatcacaacttgcactatttatccaggtcatctgcaatgaggttcacgctgaccagcgtggacacgcccttctcctgcatggtgatgccgtagaggcggtccgctgagaccatggtgcctcttctgtgggtgataacgatgaactgggtattcctggtcagcttgtgaaggtatcctgcgaaacggtccacattggaatcgtccagggctgcctcaatctcatccagaagacagaatggggacggctttaggttctggatggcaaacagcagggaaatggctgtgagagccttttcaccgcctgagagctgcatcatgttctgcagcttcttgcccgggggctgggcaatgatctgtatgcctgcctccaggatgtcctcgtcctccatcagttccagtgtgccccgtccgcctccgaacaattccttaaagaccttgtcgaattcagcccgtatttcaccaaacttctcttcaaactgacgccgcatcccggtatccagttcctcaatgattttctccagctcggcctgggcagtgaccaggtcctcgtgctgggtccgcataaactcgtagcgctccgatacctctttataatcctcaatggcgttgacattgatgttgcccagtccctttattctggatttcaattcatctataagcttctttacctcagggacagactggtattcctcccttttaagctccagtgccgtggagtaggtcatctcatattccgaccacatataggcggtggaagcctccagcttttcctccagcttttccttctgggcctggacgcggaacatatccttgtccagctctgccaggcgggcggtcagttcctcccgctttgccagaaacgccttctgccttaaggacatctcctccttttcagcctcatggcccgccatcacctgttccagttccttcatgtgcaccatggcattctgaatcagttctcccagatgcgcaatctcctggcgcttgccctcaatcacctgcccggaattttccgtgccttcggccagcgagtcaaactcctctgtaagcttctttatttctccggacacacggtctgagttttcacggataaagtcctgtttctggcgcaggttggctgcctccatctgaagggccgacaggtccgcagcacaggtctcccgctctttcctggagttctccaggagaaccgtcttgtcctctatctcctggttggcctgggtactcacctgctccagttccctggagtcctgggtgagagccgtacggctctcgttgatttcctttacctgctcctccagctgtccgtgctcgcgcaccaggtccgtggatgactccgcaatctccgcctttttatcctccagctgggatatgttcatacggatggtattctcccggatggccatggactggatgtcggcgcgcagcttctccagttccccctttttctcctgagccagggattcttccaggttcagttccttttgaatcttctccacctggaccagcgccttgctgcaggtgttctctaactcatcaatctccctgcgccgtcccagcaggttgctggaattcttaaaggcgccgcccgtcatggaaccgccggcgcttaagagctcgccctccagggtgacgatgcgcagactgtacttatactttctggccagcgcaatggcgttgtcgatggtgtctgccactaccacacggcctaacaggtacctggccaggccttcataccgggagtccacctggaccagatcgctggccagtcccagaactcccttttccttcagggccgcgggctgggaaaatacctgtttgccgttaatgctggtcagcggaaggaaggtggccctgccgtatttattcttcttcagatactcaatcagctgtttggccgttgcctctgaatccgttacaatgttctggatgcttccgcccagggctgtctcgatggctgtctcatacttctggctggtggtgatgatatcagccaccaccccatgaatgccgtgtacccggtcacgcacctccatgaccctgcggatgctgttgccgtagccgtcatagcgttccgccaggttcttaagggactccagcttggtgtaggccatatggtactcctgctgggtgtcgtttaaattccggttcaggcggcgggattcctgctctgccttaagaagggcgtcctcagtctcctgagccgcgaactgcttctgctccagctcctcattcagctggtctaacaaagcccgttccctgccgatgtgctcatcctgcaccgactcgtcgctcttaaatctgagaagcttctgcgatacctcgctgcgccgtaaattcacctgctccagcatggtctcatagcgctgctgtctggccgtcagggaggctctctcgttaagggcctgtatgatgctcccctttgccccctcaatggcttcctccagacggcggatggcctcatcctgtccctccaggcgggctccggcttcctcctggcgctttagggcatccctcacctggccgcccatggcctttagttcttctctataggagtccagctgctgattcttggcggccagctcctctttaatcacatcccgcctgtgctccagatgctcctggttcatctcctccgtatgtatctgttccttcaagacattgatctggccctccagatttcccttcagcaccgtgccctggctcagctcatcccggtcagctgccatgcggcgctccagatctgccagggactgctccagctcctcatatccggccttcaggcgctcagattccctgcctgtgtcttccatatcgccggagaggatctgctggcgcttctccacttcctccagctgctttcccgttccctctgtctccatgagaaacaggttggcatcgcatatcttaaggctgtcctttaactgaagatattccctggccgccctggactgacgctccagggggcccacctgcttctccagctcggagaggatatcgcttacgcggaccaggttggcctgctcgtcctccagcttcttctgggcaatggccttgcggcgcttaaatttaacgataccggcagcttcatcaaaaagctcccggcgttcttccggcttaccgcttagtattctgtcaatctgtccctgtccgataatggagtatccctctttgcctatacccgtatcatagaacagctcgttgatatcctttagtctgcaggcgctgccgtttatcatatactcgctctcaccggaacggtagagacggcgggataccgtcacctggtcatagtcaatggccagctgatggtcgctgttgtccagggtgatagccacgtaggcaaatccctggggctttctcatctcggttcccgcaaagatgacatcctgcatgctggcgccgcgcagctgcttgatgcgctgctcgcccagtacccagcgcactgcgtcggccacattgctcttgccgctgccgttggggccaacgataccggtaatgccgttatggaattcaaataccagcttgttggcaaaggatttaaacccctgaatctcaatactttttaaatacatagtccacctgcttattcttctgctgcggcttcctgcgccttaagcttcaggatgccgttataggcagccacctgttctgccgccttcttggtacgtcccgcgccccggccgacctcctcatccccgattttggcacagacctcaaaggatttattgtggtccggcccttcctcacggataatctcataggacaggggcgcctcctggcggctctgcaccatctcctgtaagatagtcttgctatcataaaagagctgcttgtgttcgatgtcgtttaagataaaacgatgaatgaactcttttgcattagcaaaaccaccgtccaggtaaatcgcgccaatcagtgcctccatggcgtctgacaccacggaattgcggttccggccgccggtggcatcctcgcccttgcccaggtacaggtattggcccagcttaatatccccagcgcagtaagccagggtgggttcgcacacaatgctggccctgatttttgtcaaatctccctccggcagtgtctcatacttgcggtagaggaattcgctggtcacgatttccaggacagcatcccccaaaaactccaggcgctcattgcacctgctgtggtccagacggtgctcgttggcataggagctgtgggtcagggcctgggtaaacaggttcttgtttttaaactcgtatgaaatcctctcttccagttcttttaaatgactgttcataatgatccttccttcttcaaatacccgtggggcaggtcttaaaacatgcctcccaaacgcacaaaaagggctgtgcttacagcccctgtgcctgtccgttagtttaaagcgttcttaatctgctctactgcatcgcctactgtcacaatctgttctgcagcctcatttggaatctcaatgtcgaattcctcttcaattcccatgataatctggaaaatgtccagtgaatccgcacccaggtcatctacgaatgtagctgccattgtcacttcctccggttcaatgttcaaaacttctgcgataataccctgtaatttctcaaattccatctcttagctcctctttcttaaatcttgatttttaacttcgtccctcggacttatttttcgttttggacgtccaggcactgacggattttaccattgatatcctgttccttaaacgtcacacattgaataatggaattacgcacctccgtgcgctttgaattgccgtgggtcttgactacaaggcctttcagacccagcaggggggctccgccgtactggctgccgtcaaaggatttaagtgtttccctgagagccggctttaccaaaagggcgccaatcttactgcgcagggtagacatcataccgcccttcaccatgctgattaaggtggccccaaccccttcatacagcttcaggattacattgcccacaaatgcctcacagacaatgacatccgctccgccatggggaatttccctggcttcaatgcttccgatgaagttaatccccttacattcctttaacaggggaaatgtctccttcaccagcgcattgcctttttcttcctccgcaccgatattgacaatggctacccgcgggttcttaattcccatcacatgctccatatagatggaacccatctgggcaaactgcgccaggtgagacgctctggcatccacattggctccacagtcaatcaaaagtgatacgcctttctccgtaggaataagcggtgccagcggcggacgttccacacccttattgcgtcccactatcacctgtccgcctaccaggattgccccggaacttccggcagatacaaaggcatcggcttctccctgttttacaaggtttaagcccaccacaatggaagagtccttcttcttacggatagcgtttaccggcggctcctcagtggcaattacttctgtggcgttcaccacctgaatctggtccttgttataggtgtgctttgacagttctgaaacaactgcctgctcctgccccacaagaaatacctggatgccaggttttgcgttcacagcctccactgctccggctaccatctcgcccggcgcataatctccgcccatagcgtctaccgctactttaatcataatgactctcctttcggtcctgcatacaacttataatatactagatatcattctataaatcaatatgttttttcactggtttttggggaattgaaggcccctgtttgtgtctgttccaggcgtacatacgtcaggaatatgcatacttctgcaacgtttggattgtcaaccggcctccggagtggtaaaataaaagcagataaagccagtgatacttttatgatatttaggagggatttctatgaattatgaaggacaaatctgccgcggtcccatggaacgctcatcctatatgcttccggttgccgttggctgttcctacaaccggtgcaaattctgcactctgttccgacacctgaaatacagggagcttcccatggagcagatagagggggagctggaacgggtccgtaatctgggagggaatccaaagcacgtctttctcggtgacggcaatgcctttggactggacacaggccgtcttcttaagataacagacctgatccaccggtattttccggattgctgcgccatcaacatggatgccactgtcaccaatatccgggccaaatcccaagaggagctgcaggccctccgggctgccggtatacgccatctgtatttaggcattgaaagcggcctggacgatgtccttgtccgtatggaaaaggaccataacctggaccaggcataccgccagattgaccggattcaaaatgcgggatttatttatgatgcccatatcatgaccggaattgcagggcacggaaggggaagggaaaatgcatatgccaccgcagaattcttcaaccgcaccaggccccggcgtgtcataaacttctcattgttcctgtctcacagcgcccctctgtaccgcgaggcccaggccaaaacctttgttcctgccacggagctggaaaacctgcaggaggaacggctgcttctggaacttctgaccaccccggggcccctggtatacgacggattccacgaccgcattgagttccgggtccggggaaccctgcccggcgaaagggagaagatgctggataaactggaccgggccattgaacggtacaagaatcaggagccggttattacgtactaatccattaagcaaggccagccattacagttcttccccattgctttcaatcaccttcttataccagtcaaaggaatccttttttctcctggataaatcccctgttccgtcgtcgtatttttccacatagatgaagccgtaccgctttgccatctctcctgtggaagcgctgactaagtcaatgcagccccatggagtataacccatcaagtccacgccatccctgaccgcttccttcaactgctcaatatgctttttcaaataatcaatgcggtactcatcatggatttttccgtcctcttcaatcttgtcataagcgcccagaccgttttccaccaccattaaggggatgcggtagcggccataaagctcatttaaggtgtaccgtaagcccttagggtcgatctgccagccccagtcgctggattccagatatggatttttggcccctccggctaaattgccgcctgtccggaccttgtctttgtcagcgctctcgcagtttgacatgtagtagctgaaggtatagaagtccacgcagccctgctttaaaatttctgcatcccctggctccatgttaacagtgatttgattttcctcaaaataccgtttcataaagtgaggatattctcccctaacctgtacatccccgcagaactggttcatgatctggtttttcttctgagccttcaatatatcattaggattgcaggtgaggggataggtggtgatatggcagatcatacagccgatttggcagtcagggtcaatctcatgtccttccatgacagccagggcgcttgccacaaactgatggtgaatcccttgaaaacgcagggccggaatatccttctggttcataaaatccgtggtgccttcatttaaaattcccagggacaaatagcctcccatgggcatggtgcctgcgttgatttcattgaaggtcagccagtatttcacctttcctttataccgcttaaataagacctttgcgtatttcacaaaaagctccacacattctctggaagcccagccattgtatttttccgtcatggcaaagggcatttcataatgggaaatggttaccaaaggttcaatatcatgctttaagcattcctctatgacatcatcatagaattttaatccggcttcatttggctcctcttccattccagtggggaaaatcctggtccaggcaatagaaaaccggaagcacttaaaacccatttctgcaaagagggcgatgtcctctttataatgatggtagaaatcaatggcctcatggctgggataaaaggtcccctcctccacagctctcgtaatcctcttggaggttgtgcgggaacctcctgtgcacaaatcagcgcaggacaccccctttccgtccacattccaggctccctcgcactggttggcggccactgcgccgccccataaaaagttttcttttaatactgacattgtttcaatctcctttctatattttaatccacccaaaggcttttattttcatagcgctgatccaggtggccgctgaaccatctgccgttcatcacatttgcgattaccttttcttttatttctttggatatggtttcatcctggtccatttcatccataattacaccgtaagacgtttttacagacttacattctgccagggctttgccctctgcggcgtcaagcaccatggtaagatgcgttttttcgtcccatgggctccaggcttcaaggccctggctgtttggatctcctgtgtaaaggaagtttttaaggtactgcaaaaacagattccccatgtccacatatccaggctggttaaaggtatcaggcagcatgggggcataattgttctctgtggaaagcatgggtataaaaataccatggaaagacccgtaaacaggaattggataggcggagctggaatctccataattgacgctgcataaataaatgggagattcataggaagagctcatcttctcagcggaagcctctgtgttaaaatatccatacattctgcttccatattttatggcaaaattttttgcggcaaggagctcctcctctgaaagaccttccatgccgcttccggaataataactatctccataggcaaacatgctgaattctgtagttccggtgagcatcagaacaggcacatctatatacgcatctgtttcaaagccttcctttggaatcacaacaccatcggcgtaaaggtgggggaacacgctcatccgtattcccgcgtttcccataagggcgcttaagcgttctgaagaaatgctgtataaataatcccgcacctcctcccctgttcctaaaagccattcctctgcctctgtttcatcccctgctttcccatcctctacagccagaggcgcaatggcagctgcaattttttttgcgctcaattcctggtcggacacggtcataccgccgctgaaaaccacggctttttggaattttcctttaaacagagggcttatgagcatggccatcacatcgcgccctcccgcactgaaccccgaaaccgttatgttttccggatcgccgccaaactgctcaatattttcccttacccagtcaagagcctttgctatatccagcatggcaaagttgccggtggcatgttcctcttccataagggcgggcagacagttaaagcccagaagtcccaaacggtaattcactgatacaaaaaccatatcattcttcactgccatttcagttcctattaattccctggtatttccggtttgattgttgcctccatggataaaaaccataacaggaagctttttggcccctttcctgctgtaaacatctaagtttaagcaatcctccgttccgataaccgcttcattttcaagctgaagggcaggctccttaaaatccgtggcggaaagcctttccgtccagacatccggatccaatggtgccttccagcggagactgccagaaggttcctttccataaggaatgccgtaccataccagcgcctcccccttttcagtcccttcaaccggaccaaaagcagtatcctttctcttttcctctgcagcctcctgtggctgggctgatgtctccggcgcagcagccggcgcttccggaaccggattctccccggccgcagtctcctgcgtcataaccgcttgtcctcttcccatgttttcccccttgcagccggatgccagcacagctcccgctattaagagcaatagccattttttcttcataaccacaccttcttttcttttatacaatggtaagcaatacctctcctgctgcaatttcttttgtttccgccgccttgatgctgataaaatcagcggggttggaaatcagcacaggagtgatcacatcatagcccttttcctttaataagcttaggtcaaattccagaagcagatctcccgccttcaccctgtcgcccattttacaatgaagagtaaagccttctccttttaaatttaccgtgtccaggcccacatgaattaaaatctcggcctggttatctgcagtgattcccaccgcatgtttggaatccatgaccgcgctgatcattccatctgcaggagcatatacctttccgtcagaaggaataacggctgctccctctcctaaaacgccgccggaaaataccgggtccgatacctcctttaaagaaattacagcgccgtttaaagggcttttgatttcaatgcgctccaccaaaggctttatttcctgcggcagggtctttgtctcctctgcgctggcggcttccttctctcccgcttctgccgggtcgggtttataaagcgcaaggctgaccaggaaagaaacgcccagggatatagccagggcgataacgccgttaagaagatttgccaatccctctccgccgatcatctgaatgagcgtcagagcggagggggaacctcccatggtataccccaccagatgggtgattccggaataaagcccggaggctcccgcaccgcagactgccgcaatcatgggtgttttgtattttaaagtaattccatacatggcaggctcagtgacgcccgccacaatagcagaaatcccagcggctgatgctgtggattttacaatattatctttggtcttgacggctacagccatggaggctccgccctgagctaaattggagcagaacatggtggtaattaataccgcgtcgtaaccaaagctggccagactgatggtacagatggggatcagagcatagtgcattccggtcataacaataaaaggcatgattgcggaaagcacggcaatgattagccagtcaatcttattataaaggaaattaactccatccgccagataatttcccactatggctccaatagggccaatcactaccagaaccacgggaacagaaacaaatatgacaattaaaggctttaaaaacaccttcaccatatctgggcagatcttatccgcaaacctttcaatccacctcataaacgggaccatcaaaagcaccggaaggacagaagagctatacgaggccgaggttacgggaagcccgaaataagaggtgtttccctgtaaaagcaaggccccaagatcgggatgaagcagtacggcggccatcaccattgctaaaaaggggttgctgttcagcctcttagccgttgtgtatgccagcatgatcggcataaaataaaagaaagcgtctcccactgtgttcaggatcatataggtgctgcctgtggtgtccaccagattgaaggtggtgagcaaggtcagaatcaccttaatcataccgcatcccagcatagccggaagaaggggcgtcatgcagcccgccacaaaagcgcagagcctggaaaacaggttttcctttggaccgccgttttccgccctccctccgtctgagaaatcacccagcttttgaagctcggcaaacacatgagtgacctcattgccaataaccacctggtactgacctccctgtttgatgacccgtaaaactccgggaattttctccacctctgaatcctttggaagccccatgtcctttaacacaaagcgcagccttgtgatgcagtgggtcagaccctccacatttgcctttccgccgaccatttctaagatttgtccggctgttttcgcataatcgaatgccattttttctacctcctctttattttttgaaagccatagctttcagctgcaaaaaaccctgacaaagcctgccttcttccgccgggctgaaaattacagcctctggcggacagcagagaattgtcagggtcatgcccctcccggaaagccagtcaggtaacactcctgtattctattttagaattattgtctggttattttttcaatatgaatcatcaggtaaagcatctcttccctgttcaattcataatgatacacatcgtgaataaaatctgctatctttacaatacatttgtaggattgaggatacttttccttgatcagatgaaaccattcatcctctgcgccggcgcattgctttccctcaaacatcctcttggcaaagaattttaaatgagtgataaacctctggtaatcccagctttcctcatccatccggatctggtagcaggcctccacaatctgtgtgatctccttaatgagccttgtgatggcttccagattctctacctggctgtctccaagctgggagcatacataatgaaaggctaagaacgccgcctcatccggctccatctggatatgaaacctctttttcaccagctcaagcccccggcagcccacctgatattccttgggatataaatgctttacctcccaaagcatgggattttttaagactgctcctgattgatagcgttccactgctcctgccaaatgatcacagataggaatcagcacccgttccgaaaccttaagctcacagacttctctggcgtaatgggtcatctgctccgcgatctcccaatattcctccggcagctttgcaaaaaagtcctgaaacctcttaatttcattcttgtcattgggtgtaaaaatgcgctctacctgggtgcttactatggaatccctttttcttttgttaaatccgattccctttccctggagaataatttccttcccctccgggttgcgggatacaaccatgttattattcagcaccttttcaattaccataccggaccttcccccatgtgttttgtaagtcaaatctcccatcccaaacagcgggcgttctatttgcagctccccaagcggcgagatatttgactctcgcagcaacagccatacagacatgcaaacatgtcaacgcagctcgttgttggcagaaataaaaaaacaagttccacaaaataaaactccgccatccaccatggagtcattttcttgtagaccttgcccgcattaccggtcacaaactaccgtctattcactatgcgtagtataacattcttgttttttattgtccagatgtaaaaatgcacacttctcaactatttttttgtgcatttttacatctgataaaattgttttctttgaacattaatttcttcggaaagctccgaaaaatcctttcggaaatgggtattatgtaaacaagggttctcggtcaatatagccgaaaacccttgtttttcctagcttttttcactttttacaaaaatgcttgttcttaatcttcaacgcttacgatttctctcttgttgtaagaaccgcaagccttgcaaactctatgaggcatcatcagggcaccgcacttgctgcactttaccagatttggagcgctcatcttccagtttgctctacggctgtctcttctagctttagaagatttattctttggacagatagacatggtttacacctccttcgactgtttaaaaatatcctggataactgacatccttgggtcaagtggcctattatcgcagtcacaagtctcgtggttgagatttgtgccacatctatcacagattcccttgcattcatcactgcagagaaccgccataggcaggttcaaggttaactcattaccaaccagctggtcgatatccagtttataaccatttacgtagggctgctcgtccaaatcttccacccgctcttcatcactctggttcatgtccagttcctggtcaatttccagatggaaaggaactctcacggggtcaaggcatctggcgcatggcataatcagaaccaaatcagcggttccagctaaggtcagcttcttatttcccctatttgttatcatcaatgacaatggtcccttttctgcaatgtcgtatacagtgtcggccatcctgaactgggtcatctcaagctcaggcgtatatgttttggactttccctcaacaggaaacagctcagataagttaattagcatattaacctcctaatacgcatctcttgcattatacataccattgcacattttgtcaactatatttccgttttttttccagaagagtcgagccgaatttttttcttatattgctttaccgtcatattttcaaactttttgaaaaccttactgaaataactgctttcattgtagcccaaacggaatgcaacctccgcaatactgtcctccgtaaagtaaaaatagcctttagccagatgcagttttctcatatgaagatactccgtaacactgaccttaaactgctccctgaatatacggctcaggtatccctgactgattgcacagttctcaataatactgttgagagtaatatcttcttttatatgtttctctatataaataaaaatattctccagcagcggataacggccaatactgttctgccggaacagataatccatgactctgaaaagccagagttctgatgtttttctgtccggaatcagtacctcattaatcgggaacagttctgatatgtttccgctgtcgccatacacactcctggtgtccagcaggttctgtcccaaataggtaaaaagtttaatcagccgaacgggatcctcaccgccaattgcgtaaatttcatcaattacaccggcaattccgtcataaaaatccccgaaatctttattccgaagataggaggcaaggatttccagttggttctgcacggaatcctcatgttctgttttgtaattttccatgattttcttcagacaactgtatgtaatcggtttttccagaacgtcctttacctggctttgggcagcactccgaatcagaacgttggcggcatgggcagaaaggatatatatactaatctccggattggactggtgaataatcctgctggcctccagaccggtgattcccggcatctgcatatccatgaatacaatatcaatcacatcctctttacagacacggaccgcgcgctcaccggtatctgtcatggaaaccactttgaaagcactatcctttgcaatcatcacatgcagcgcttcgcgcatcagtatatcatcatctgctatcaaaaccctgtacatgattactcagtcctttcttcataatgctccggccacaataagatacttttcgatcctttgtttctgtaattctccgtaataatgccgtattcctttccaaacagtcttttcatcttctcctttgcatattccatacccatttttatataatagccttcatgtttgtccttataagcttcatacttgatatccagctcttcttccgtcagtcccgggcctgtgtcatttatctccagaaacatattaccactgtgcatataccctgtcaccgtaatttctccgccttccttctccagcataataccattataaaaggcgttttgtataaacggcattaaaatatcagaaggcatcttctgcatatgcagttcctttggaacctggatggaatactccagccggtcccctgttttctttttctggaatatcaggtaccgctccgcatgctccagctctccggaaatatgaacaaaggtgctcttttccgtatatttatattttatgtaatcaatataggtgctcagcagctcatttgtcctgtctgcttcttctataattgtcagattcaacagcgatgtcagcatgtccagaagctcatattgattgctctgcatctccagttccataatccgcctgttaatttgtgtgatttccttggcatagctgtggttcaatacctgcagctttttcatccgtttcttcagaatatcttcctgaaggtgctggctgacctcgttctcactaagctggttaattaccagaaaaaccaggttcgctatatccagaaatttttcatatgaataaaaaggaatttcctccagcaacggcctgtattctgcaaccgcctcctccgccttggcagaatgcataaccgatgacagcctgctgacagattccggggcatcattgcattgaatctgccccccaataaaacctcccagataatggccgcggacaataattggaatggccacctccaaaagtccgcagggacaaaagtatacgtttgtcttttgtgtaactgctgcctggatggaaccgaaggcatccgaagatttacatctctccattgcctccgggttattgcgaaccttctcacaatagcgtgaaaaggaggttgccgatgtaatgggatcccccttgaaatcaactgtaatgaaagccagtccggttgccttggataggctctcctgtattgtctccagcttttcttttccgaacaggtggatgatatccagttgattaatactgttttcttcattgatgctgagatattcatccaatgcatctggttctatcccttccatatgcatcatcttatgatattctgccatctgattaatccctctctttatgcctgtaattgttattttagcatcttttcaccatttaaacaatcctattccgaccaggagacggtacaacggcgtatggaaaaaggccgtgccagctcctttagggtaacacggtcttatgtccagcttgtcacaagtcatctttactgtcagttagtaaatacttaataatatttttttaatagcctctgttccggcttcccttggattgccagcaaggcagttatccatcagggcgttatccgtcatgttctgtagctgctcttcatatgcctctatattaattcccagctccctgattgaggatggcatttccatgcaccgcatcagggtacgaatcagctcctttaaggtgttgacagccattaccggtgattcgttcatgtcaaccaactggaccttgcaggcaagacttgcatatttgttcatgatatcatggtttacactattataatcaatgatctgatttaacagtagggcattggccaatccatggggtatgtggaacgtacctcccagctgatgggcaatgctgtggtttaatcccaggcctgccgtattaaaagccattcccgccagtgtggacgcctcatgcatcagggttctggcctccaaattctttccatccctgtagcattgtaaaagcgccttaatcaataattcaattgccttttctgacagcgcgtccgagaatacattgctcccgtttgcaacataggcctccagggcatgtgtcagcacatccatccctgtatttgccgtaatggaaggcggtacagacaatgtaagccttgggtcaaggatggccacgtctgccagaatatcatccgatgatatcagatgcttgctcttactctctgaatccgttatgacagcggctgaggtgacctctgagccggttccgctggttgtgggtatggtgatgaatttcggcttcggaaccagattcctcactccggcaaagtaaatcattcccttggccgtatcaatggcagagccgcctccaaaaccaatgacaatctcaggacgtaccttacagattacgctaagcccctttcccaccacctcgatggtgggatccggtatggcctggtcaaaaatgtccacggtattgctggaatccagcgcatctaatatgtagctgattgccccgctctctgcaaggaacttatcacaaaccaccaagatccttttttttcggattttccgcagatattccattgcgtagcttccgctgcgtatctttgtctttatatatacattagacatttgcacttctccttcatattcagtccatatactgccgcgtacagggattaacggatactaaaagcatcggtcataacacatttgcgcttcctgcaaaatgccctgggggaggtaagtccctctccggtaggtccggcaatagtgaaggtggtataaccttctccccccacgccgattccggcgtaggacggagcatttttgacaaagatagtggtctccataattttagccatcttgctgagcttttctacattcctggagtgcatcatggctgtgtgacggttcccgtgctctgcctgatgggcatattcaattgccgtatccacatcacagacccgcaccaccggaagaatgggcatcatcatttcctcctgaacaagcagatgctccttcggaacctccatgatgatgaccctgacactggcgtccgctgtgattcccagcttatccaggatataacgggcgctctttcccacaaaggatgtcttcggacctcccttttcattggttacaagcgttaccagcttctccaacagtgccgggtccgtaatttgatacgccccgttttccttcatgttgtgaatcaggtaatcacaaattgaatccacagcaaagacttccttttctgcgatacatggaacgttgttatcaaaactgcatccatccacgatatcttttgcagcctttacaatatcggctgtctcgtcaaccacaaccggaggattgccggcacctgcgccgattgccttttttccggaagacagtaccttcttgacaatggagggacctccggtggccaccagcagacggacacttgggttttcaatcattttattggtattttctatggacggctcttccaccatggtaatcaggttctccggggcgccgctctctgtcagggctttgttcaacagctttactgtcatctgtgaaaccttttttgccctgggatgaggactgaacacaactgtattccctccggcaatcatggaaatggaattgttgatgattgtctcggtgggattagtggtcggcgtaatggcgccaatgacgccaaagggacaatattccaccaaagtcagtccgttgtcaccggtcacggcctctgtcagcaaatcctccgtacctggagtcttctcagccgccagccggtttttaattaatttatgttcatagtcgccaatctccgtctcttccacagacagcctggatatcatctccagattctctcttttaagaatcgtccggcggatcacatccacatatttctgcctgtctgaaattttagagaataacagctttttctgggcttcttctgaagctgcaatcgcctcatccattgttttaaatacgccatacagctctgcctttggcattgtaaacttctggggctgttctgcctttatctcctttaaagcctgttctaccatctgttcaattacttttatatccatatccaagcgtatcacaccttccttcatttatacggggccagcagaggcattccatgcgatgccgagaggagtaaccaagagcgcatcattcgtcttgaccgttgtgatgcccaatgccttctcaaatgtatgttcaaactcgctgaagcagctggctccgcctactacataaacacagtccacctcatacccggaaaggaatcccttgacgatagatgccatcttttcaaccactggttttatgattggaaagacatccctttctttgtccttatctgttttcagtttttcggcttcctcaattgagattccataatatcccgcaaggaccagagtcatatgggttccgccggtaggctcatctgcggtaaaaatcacccttccgtctttcaatatgctgattccggtggttccgcctccgacatccacaactgccccgtctctgattcccagcaccgaggctgccgcggtgggttcatcaatcacatgaatcacttcaaatccggccccctccaccacattagcaatacaccttacgttcccctcaatgattcccgggggaaccgcggtggccgctgtttccaggggcactccaagcatttcctccagctgggccttcaggcggcgtacggtctgcatcgcgcccacaaaatccaccacaatgccgtcctttactgctttggaaacagcggtcgcgcctgcaacaggatggttattctcatccgtgacagcgattactatgttggcagttcccaaatccacacctgtctttaacatccctgaaaagggattgcatttgttctcccttatcagctccgaaaattcagacagcacttctttggtcatgagcatataacccctcttttctaagcttgatttatcgccggattatgacataatcattgttcttaagcgcacatgcattggcttcatccacatccacatgcatctccagttcaaattgttctgacacccggattaatacatctccaaacactccgtgtctttcaccgaatgtttccacctccacgatatccttatcccatacccccatggcctccgcctgctgcggcgtcatatggatatggcggagcgctacaatcgctccccggggcagccaaaccgtgcccttgggtcccaccatttccagtccgggcgttcctgtcagatcccccgactccctgatgggagctttgacgcccaggcggaagctgtctgttttggatatctctatctggctttgctttctgaccggccccagtatacgcacccgttcaaactctccttttggtccgcggattgtcacagtctcattgcaggcatattgccccggctgttttaaatcgctttttttggtgagctgatacccttttccaaacaaggtttccaaatcttccgaggtcacatgaacgtgccggttggaaactcctacagggattttaaacgcattatattttgtaatcttatctattacccgtccggtaatcagtttcagcagttcttcatttaccatcatgttcaaccccttccggaagtttggataccggccacggaagccggtatacacttactggcatcctataacgatttgggtaaaattttctctacatccgtatgtggtcttgggattacatgctgggatactacctggcccacatttgccgcagcggcagcgcctgcatcaaccgatgccttcactgcgcccacatccccgcggaccataaccgtaaccaggccggaaccaattttctcataaccgataagagccacatttgctgcttttgtcattgcatccgctgcctcaattgctcctaccaaaccttttgtctcaaccattcccaatgcttcatttgacatattattttcctcctgaatgttattttttatttattataaaaactttaaaaagccaactgtttcagcagccaggccttgtcggtttcttcccacctgaaaccctggtcatcccttccgaaatgcccgtatgccgctgtctttaaatactggggtgtccgaagattcagttcttctatgtaatcagacaccccaaatgaaaatacggatttgaccagctcctcgatgtggctgtccggaatcctgccggtaccaaaggtattaatggtaattgcctccggttcaatgcctccgattacatatgccaaggcaacctcacatcggtctgccaattccgccgccacaatattcttagccacatagcgggccatataagcagccgatcggtctacctttgtggggtcctttcccgagaaggcgccgcctccatgttttccaacggtaccataggtgtcaaccatgatttttcttccggtgacgcccgtatccccggcaggccctcctatgacaaagcgtcctgtgggatttacatgaatcctggtttccggcgtaatccagcgggaatcaatgaccggctctatgaccgtacagcgtataaacgcgtccagcagctcatgggaaactgcctctccgtgctgtgcggacacaacaacactgtggatacccaccggtttccctgcctcgtcgtacttcatcgtaatctgggttttgccgtcaggatataaaaaatctgttttcagaacctttctcacataggccagacgttgggccaggcggtttgccagatggcaggacagcggcatcaggctttctgtctcattgacagcatagccatacatgattccctggtctcctccgcccagaacctccttcccggtttcgctgcttctggtgacacccatggaaatatccggtgactggttatggatattggtaaatatcatacatgtatcagcgtcaaatccttttccatgttccgtgtagcctattcttctgataatctccctggcctttgccgctgcatccacatggccctctgatgtgacctcgcctgccagcatcagcgtgttcgcagatgccatggcctctattgccaccctggatttcgaatcctgctccaaatatgcatccagaatgccgtctgcaatctggtcacacaccttatcaggatggccttctgttacagattccgaagttacgtaataaaatctgtcatcccgtccttccatcattccatcaacctgctttcctaattacaatcagcgaatcgaaaatccacttgtcaacgtgcatcttctcctgcgggcaaaatgccttgccgtggtagttccctctcctgtggtggttgcgattgtaaagctggtatgaccttctttatcaaagccgattcccataagggaaggaccgtttttaacaaacactgaggtctgtaattccctggcagcccggttcagatgctcgatggactcagaatgaatggttgccgtatgtttatatccctgctccacttccaaggcgatttccagagcctcgtcaaaatcagccgcctttaccaacggcacaagaggcatcataagttctgtgataacaaagggatgcatccgccctgtctctgccacaatcagttttatggctttgctggcgggaatgccggcatattcaagaatctccttggcgctccggccttccagtttcttattaatcacaaaatcctctgtgactgcggcattcagaagtttctggatttccgcctcattccggatatagtacacaccgtttttcagaagttcatatataaaacggtctgatacgctctcctccacaaccatacacttttctgatgtacacatcagattgttgtcaaacgaagcgcctcttacaatatctctggccgccttttccagattcgctgtggcatccacaatcgtgacaggattggccggtccggctccaatcacctttttaccggatgtcatggcctggcgcagggaaccgctgcccccggtgcagacaaccaagtcaacatcaggatggctcatgacctctgtggtaaatcccatcagactttcatgaagggtgactaccagattgtcaatgccgctgatactgcggattgactcgctgataatcgtggtcaggaattgtgaaaccttaactgctctcggatgtgggcaatggatgattgcattccccgcagccagcataccgatagtgttgctgataagagtcgcgcagggattggtgcatggctgtaccgcacatacgataccaaaagaggaaagttcatagagtgtcattccatggtcgcctgtattgacttctgtaatcaggtcctccacgccgggcgttttctcgatggcaagttttattttctgtgccttatcctggacaattcccatgccggtttccgcaactgtcatggcggcgagttcatttgcaaggggacgaagtgcttttttcactccttccagaatttcctgccgttcattcagggtcagctttatatatctgccgtaggctccctttgcagatgctactgcatcagtcacgctggagtaaatactgcttttcatgtcattcattacctcctttcccactaaaaatgattacactatatatccattgtatctacgattccgataattgccatatcaatgacggcctcccgcttggactggtccacacgtacagaagagcccgaaccaatcaggactgtctcaccaattccggcccctacataatccacagccacttcctctgaatcaatgaaattaccatgtccatcaatccgtctgataatcatcagtttataacccaccagagaattatcttttctggtagccacaactgttcctattatcttagctaatctcatgcctttcacattcctttcacggagaaaccggccgtcccttgccattaccggtattcctgatttcaattaactgtttttggtccttgcggtacctgtgcctttggcagctgatgtgcgcctggaaactttctttggtttttccgccagcttaaagtcctcttcctctgacggctgttcggcttctgcctgcggctcatcctttgaatccgtctcttccctcacagaatctgcctgcccgccgtccggctccggttctccggctgtttccgggctttcccgcattgtctcccctgtttttccggttcctgtctcctcctgcgcctctttcatcggaggggagggcggtactggcggttcgggacaacagaatgcctgttccacataatcggacggtcttggaatgaccttccatgagaccagtttattgtttgccgctccaatctgctttcccgcattgacggcagcgttaacagctcccacgtccccggcaatctttatagtcatatatcccagaccctttgtattttcaatctccagaatgcggatattggctgctttggccatggtatcggcggccaaaactgctgtggacagtccgctgatttcaattaatcccaatgcctgtttcatcctatcacctcactctcctttttatttgaatactatctttagaaatttcgccctgtcttttgccaaatccgtcacgatatctccgggctggagatatatgacgccgtcagaaacaaattgttccacgttggatgacgatattactctttttttctttttatccggctccaatgtacatgtgctgttttctgtccggcaggccattgtccggtccgtcccttcacacggtatttcataagggactctgcccgaaagctcctctgtgctgcatatctcgactccaaattccagcacctgtctgtaatactccatgatacgtttccggtatgcaggtttttcgtttccggaaaatttttccaggcccgttagaagcaatacaacccggctgccctgtttcatgcattctgctatccatgaagtctcgtatgtatcgctgatgcataatgctgttttcaccagtacgtccctgggaactaccggaagcagcgtcactgctctgtccagattatccggcatttcgccggagcggtacagaattttgccaaaggatacggactgcctgagtctggcctcatatcccatattcttccaggatggggggatgacgggaacaatatcatatgcatccgacccttccattttctttagaaattccatataccgttcactccacggggatacgcacagcatatacagagtctgtttggaatccttcatgcattccgctcttttttccgcctccaggtcacttaacacacgcagtaccagttctttcagctgttcttcactgatattcaattccttcacctcgtttcaaggaatgcccctatccgttggataggggcattccccgctgcaaccgctgacagataagtgtttttatctgctgcctttattcaagatgtggaagaatcttttcaacatctgtatgaggacgcggtataacgtgggtagatacaacctctccaactgctgccgcagaagccgcaccagcgtcggtggctgccttaaccgcgccaacgtcgcctcttaccatgacggtaacaagtcctgaaccaatcttctcatatcctaccagagaaacattggctgctttgaccatggcatccgctgcttcaatcgcacccactaagccttttgtttcgaccatacctaatgcatctgcattcatattagaacctccttaattgattcacattctccggaactgtcttactagatgtacggagttgttgtagatttcggttcatcccccaatgcccccagcatcttctttccggcttcaatggaagctttcactgcctggcgtacagctcctgaatcacctgtaaatgtaaggataacctcattggaatagctggtgccgctggacggtgagcagtaccctaccacctccacattagctgccttcactgcaatatctgccagaactgtaccgattgcagccggccctgcacatgtcatgccgaatgcccttccaaccggtgcgcccagcgccttttccagacagtagctggctcttgcggtatactggaactccagatgacctgcatcgtttccatatacatcgccaaaatatttcggaaggacctgaagggcgatctcaactgctcttcgtgcgtccgacacatcgtctgcaccaatatatatcagactgccgtgtccggccccgccctttgtatctctgggaagctccacagagataatctcggtattagttgcctttacagcctcgtcaaccgcccaaatctgaggaccggcgccgactcttccgcctacaataccgatagaacggtatttgcctaatttcatcacgtctaccagaagggggtccacactggcaatcacaagtccgattgtatctccgattgctgttcctacaaactcggtcagtccgatattgctgccgcagcattcttcctttgtcgcctctgacctgcattcctcctgcttgataccaagctcgtcagaaacctgcttcattaccttctcaattaactgctgatccattcttcttcctccattctaaaatcgtgtctaaccgccgatgatacattgaaaaccataactctccaccactgtcctgcattcctccaaatcctccggcgccagcggcttaacctgcttcatagtataatcctggcctaacaatccatatttgttctcgccaaaggaatggtacggcagcagatgtatggtccgtatgcccgccagagttctggcaaactccgaaattgccttaatggcctccaccgagtaattaaagcccgggatcacaggaacacggattacggttttggatattttacagatttcgggagcatttttaatgaccggttcattgccaatgcctgtaaactttttatgctgcccgctgtccatgtgctttaaatccagaagcaccgtatccacataaggaatcaccttttcaatggcttccctgcttcccacgcctgtggtttcaatagcagtgtgccatccctgccccttgcatgcctgcagtagttcagaggcaaattcatactgtaccagcggttcaccgcctgacagggtgatgcccccgccggaacgcctgtaggtagtggcatcctttttcagctcccggattacctgttggattgacattgtttttcctttaagcacaagagcacctgcaggacatgcgttggcacactcgccacatccgctgcacagatccctgttgacccaatttttatgttccgggctgattgcccccttcctgcaggccgtcatacaacggccgcaatggaggcaatcagctgctttatacatgataactggcttgatactttgagattcaggattactgcaccacttgcaggagagaggacagccctttaaaaacacgattgtccggattcccggaccgtcatgcagggaaaacctttgtatgtcgaacacggttcctgttaaattataattgattgaatccatgccgaactcccttcactgtattatgctgaaacctcactataaggtctgttctgtacggctgataatatcatcctgaacttcttttgccagaacggtaaactgggcactgtatcctgcgacgcggaccaccaggtccttgtaatcctcaggacgctcctgggcggcaagcaacgtttccctgtcaattacgttaaactgcacatgcatgcctttgtggtcaaaataggaacgcacaatggatgcgaaacgcttcagtccctcgtctcctgcaagtgcggagggaaggaacttctggttgtacagagtaccgttggaatagtttgcatggtccagtttagctacggacatggctgctgccgtcggcccgttgatatccttgccctgtctcggagatacgccgtcggccaaaggagccttggcaagtctgccgtccggaagggcgcctacgtcctttccaaataatacattggctgatacaggatagcagcctgcctggaactgtccgccgcgcggattcttatacttctctacctcataggaataaatctgtccgcagcgtcttgcaatcatatccacttcatcatcatcgtttccgaaccagggcgtgttctccatcagcctcttaatatgtgcataatcggcattcacacaggccgcttctgtcttagccgcctctgctgctgacggccagcggcatgcctgtgctggcgcggacagctgtgactgaaggtctgccagattgatggaaccgttattactcagaatccgtttcactgcctcgtaaatcttcgcctcatccgtgcacacatcagccgcaggagcggaaacactgcatgcatagccgaagttattggccaaggcttcctttaactgggccatggtcacttctttgctctcaaatacatgcttcttgatagcacacagggaatcgccggaatcagctacgccaaatgcctgaggtcctgtaaagttgtagattgctccgccctcctgaacgctttttcctcttcctatacagtcatcaaccaatgctgacagaaatggaagaggggctctctctgcatgtgcgaagtcaacacaattgtcagcttcggccagatgatatacgaagtattccatctgttttttgtatgcagcaaagatatcctccaggctgttaaaggaggtgatatcgcctgtctgcggtcccagctgcttgtcgcctaccttgccgttattcagggtgatttccaggaccttggcaatattaaagaatgcagcgtcatgccagccctctgtcttatgcggacactgaggctccacgcacccgatgatacaatagcttctggcatccgccagggatacgcctctgttacacaatgcgggaatgatgacttcgtcgttatacatggctggcacacccagtcccaggcgggtcacttcgcacgccctgtagaggaattcatccggtgtgttctggtgaacacggatggagaaggacggtgcgggcagcgccacatgggcaactgcttccatacacatgtaggaaatatcgttggttgcgtccagtccgtcttctgtctgaccgcctacgatcagattctggaacactgcgtatcctgcaaatgcctgggcggaaacctcgtctcgtgtcttattgacgtcatttagcttaacccagatgcagtctaccagttcctgtgcaaattctttggaaatatttctgtctgccgccaaatgcggatacatgtactggtcaaaacgtcccggtgaaatagaatgtccgttggcttcaatctgaaggagtatctgaacaaaccagaatgcctggcatgcctcgtagaaattagttgcccctctttcagggactctgtcacagttagccgcaatctgaagcagctcagattttcttaccggttccggacaggacgccgccatttcccttgcctttgcagcatagcgatgcgcaaagttgatggctgccgtatatgtaatcacaagagcctcgtaaaagtttttcttcttaatatattccgggtcgctggtgttaagcttatccattgcttcaatcacctgtttgatgattcctgtaaaaccaatggtcaggaccttgccatagtctacgcacacatggcctacgccgccgtagaaataattgcctactgtaaatactccgttggcaatacagtcctttgtctcctgagacatataggaatcggctaaagcactggtggtctttccctcccagtatttgaatgcttcatgcagttgtgccgcggtctcttttggtatctggaagggatccgccattctggtgcccattgtttcaaattccttctcaacccagtcataagaaaattcaggacaaatctctgttgaacgcagattctttgtaattgcgcctacaatcagctcatcatcatgaatggtaatgggaagattgttaaaaatcttttcagccgccttggcacggcgcataataggagacagcccctctgtctctttgtaggactctgttacgagaaccgccctctcagactcaacatacggaattgcatccactattgctctcttaagacgtttcactctttcggttggctctgtaaacccctttgctatcatacaaatatcctcctttattttgttttctatttatggtttccggtttccaagaatgccctgcccatttcccccaggacattcctcctcctcataatatcctatagagccgtaaaacgaggcatattattaaaacgtaaaaaaagtaaaatacaaactttttatgtatttggcatctgccattttcactacaaggccgttacgcccaacagtttcagaaaccctctcagaatctctacatttcccggccatgcaggggaagttaccagattatcacaaatcaccgcctcatatggctccttttccatgaaaatgcctcccgcagccagcacctccggacgtactgccggatacgccgtgacctgttttcccttcagcactcttgccgcggttaaaatctgtactccatgacagatagctgcaaccggttttttcagatccataaaataatgtaccatgtccaggaccctgggattcagccggagatactccggcgcccttccgcccgtaaggaacagtccgtcatactgctccagcctcaggtactggaatgaagcgttgagcacaaaattatggcccggtttttcagaataggtctggtcgccttcaaaatcatggatagccgtccttatagcatcgcctgccgctttgtccgggcataccacatccacccccactccagccacctgcaaggcctggtacggaaccattacttcatagtcctccgtgtagtcacctgccagcatcaacactcgtttcatctgttttctcctctctctcccacggcatcacatctccctcttccctcagataatccagaatatcccccactccttcgccggtaacggagctgacatagaatatttttttgcagcccgtaagctccagccacatggcagccaggtccggcctggcatccggctggtcaatctgagttacgattcctatgacctccctggttgccatagacacaatatgggggctgtataatgaataatcctcaatggcgctcatcagcagtcccacgacatccgcctcataagagtacaggaccagcgctcttgccaatgttttgttctccgcatattcccccggtgtgtcaataatcacatcataattattaatgtactgggtcttatggtatgttatcctccgtcccttcatggcctgtgtcagcgttgtctttcccgcgccgctgcgtcctaccagcatgattttcttcatgttccacctctccctgcttacagtcatggtatcaggcctttgttaccctgcacacagtaaaacccagttcagacgatgtatactccagaatccgctcaaacgcaatattgacatcagaaatggttcccgtaatgatgagcgttccgctgaaccggtcgataaaaccaatctgtatggtagatgccttgatggccaggtccgcggttatgatcgctgtctcactgggagtaagggtcagcactccgatggctgcccggtgatagtcaacccttgggtccagccccaattttttgtaaataatctcatccgggctggctataatatgagccatggtaatctgttttcctggtaccgattcctgtatgatccgcattaaatctccctggctgaccttccagtcttctatttccatttatctccatcacctttccgactttatttttatattgtaacatcacgcaaagtttttcccttagtaatagacaaactgatttattgtattatccagacctttctctcctggaacagtcaggtttggataataccgttttttagactggccattcattgtacgggatgtcttttttctttataatgaatgagaacgggtgtttaatgatatacgaagggagatatatatgacgctgttagaacaaataaaagaagcggggatcgtcgggtgcggcggagccggtttccctgcccatgtcaagctgaactgtaccgtggaatatctcattgtcaatgccgccgaatgtgagccgcttctgcgtaccgaccgctggctcatgattcacaaagctaaagagattgttgccgccgccggcatgattggcgacatggtgcaggcaggaaaacgatatattgcactgaaggaaacatattcagaggaaattgcttccctggaggccgctatcaaagatcttggcagttctgtcaggctttaccggataaaaaacttttatccggccggcgatgagcagatcatggtctgcgatatcacgggccgtacggttcctccctccggaatcccccttgatgtgggagccgttgtctccaatctggccacagtctactccattttcaatgctgcccaggggcagccctttactgataaatacctgactgtcacaggcgccgtcggaggcccatgcattgtccgcgcccccctgggaacaccctttacagagtgcctttccctggcaggaggaagtccgctttcttcctatcacgtaattgccggaggacccatgatgggaaaatgttatgatatgaaagaagccgccggtctgactgtcaccaaaacaacatccggttatatcattgtggctgatgatactcccctggtaaaacagcatgatattccggtatctgttaccctgaagcgggccaaaatgtgctgcatccaatgctcctgctgcacccagatgtgtccgcgctaccttacgggccaccccataaagccccacatgatcatgcgaaggctggcatatgcccagtctccccaggatgtgttggaggatgagcatgtaaaacaggccatgatatgcagtgaatgcggcttatgtgaaacctatgcctgtcccatgggccttcagccccgccaggtcaatatctatatcaaaaatctgctccggcagaatatgtaccgctaccaaaagccttccggaacctttacgcagctggaagagcgaaactggaggaaagcgccatctaagcgtatggcaatccgtctgggcgttgacccgtattacgactatcacattgaccgtttggtgaccgcagagcccgattttgtgcgtatatccctcaggcagcacatcggggcgccaaacgtgcccaaggtacagccgggcgccaaagttgcacgcggtcagctgattggaggaatcccggaacaggcgctgggtgccaacatccacgcaagcatatccggaaccgttacccaggtcaccgaaactgaaattgtcatctctgctgacaggcagtagtataggaggaatatcttatgattaccatcggttttttagagttaaacagcattgccaaaggtatcctggcagcagacatgatgcttaaagcggcggaaatcaggcttgtctctgcaagacccagctgtccgggcaagtatcagatattaataacaggggaggtttcggccgtggaatcggctttaaggactggcgaggaaagtgctaaggccaatgtggtggaccgtcttctcattcccagggtacatccccaggtgattgaggccatcagcatgtccgccatgccttccagcctgaaagccttgggtatcctggaattcttctctgtcacaggcgccatcattgcagccgatgcagctgccaaggcagccagcgtctcactgattgagattcggctgggtacaggcatcggaggaaaatcctttgtcacttttaccggggatgtgggtgcagtggaagaaagtgtggaggcaggggcaaaaacagcggaaagcagcggagctctggtggagaaggtcgtgattgcacacccggacagggaactgtaccgcagtctgttctgataaggaggtaaaaccatgaatgatacatacgcagcaaaggaaataacagctgccctgttagacgttctgaagcctcagggcttatgtctgaaggaagctctgcggctgattgaaaaagccgagaaaatggctgaaagcatccatgtccccatggtcatcacagtggtggaccagggaggaaatatggttgctatgcatcggatggatgattccctcctggccagcatttccatatcatattcaaaggcatatacggcagcagccctccgcgcaccgaccgaggacgctgccagggatatcctgccgggacagcctttatacggcctccagcagactcatcctggcaggttctgtatcttcggcggaggactccccattatgaagaacggaagcttaatcggcggcctgggagtatccggcggtaccgtggagcaggatatggccgtggccagatatgcattatcagcggactaatccattataattaaccatataatcgagtaggaggaaggcgattatttcgccttccgacctctcacaccaccgtacgtaccgttcggtatacggcggttcaatcaacttaacatgtaacagccttttcggcgtagtagtcttccatggatacaagaccaaacttagctagtctctctttactgatacaaatgtggagattccagcttctgcacactctggcatatcctttggcatatgaaatgccatgtgccgcatttggcggcagaccaagtttgataagattcttttccctgttctttggcgttttccagtgtttccatatgcacatgcgcagtcgataccgaatctgtccgtccatttttgcgcacagccttttcatgcttccgattttgaaataatttatccaccctcggataagccggttgagtttcccaattttataaccattgcccactccccagctcctgcttgtatatttcttcatctgcgccttgaactttgctgccgctttcgggtgtggtctggctttgtaccctttggcaaatgagtcatagtaaaatccaaaccccagatacttaatgccctttggtttatcaaccctgctcttttccgcgttcactttcagtccaagcttttcctctataaaccgagccacgctcttcattacccgctctgccgcctgtctgctcccgaccattataataaggtcatctgcataccggacgaaatccagcctccttgcttccagttctttgtccagctcatttaacatgatatttgctaacagcggcgagatatttccaccctgcggtgtgccgactaccgtatcttcatactcatcatcaatcattacgccgctgaccagaatctttcttaccaccgatatgacatctccgtcctttattgtccgtccgaaaatcgtcatcagcttgtcatggtctactgtgtcaaagaatttcgctaggtcgatatccactatccagttgtgtccgtcattcatcatttccaatgctttaaggactgcctgctgtgcacaccgcttgggtctgaatccatagctgtggtcgtgaaactgctcctcaaatatcggggtaagcacctgtgccaccgcctgctgtacaaagcggtctactgctgttggcactccaagatttcttgtaccaccatcgggtttgggtatctccaccctgcggactggcttcggcttatacttcctcgtccgcaactgttccttaatgttttcgccgttttccgaaagatatgcgccaagttcttcaacggtcatcccgtccacgcctgccgctcctttattccttacgacttgcagatacgccgcatttagattatccctgcttaatatctgctccatgagactgcttgtgtccatgcgttgtttcctttctgccccttttgcctttgccgcctttgaagtcatcgacaggcgtatgctccggctacgaagtggaacgtacttcaactgattgattgttcagcccttcgctccgtccccattacaggaacttcctcactactatggcttctgctgacttctcacaattcgttgttactacggctaatgagaccgcctgtgagacctccccagttaaggtgcgtgttcttttcctccatgtacctgccgcatttactcgtacttccggcaaccttttggacttcagtgccttttgccaccttatccgtatttccgagccttatatgcggttcctgtccgtcaggtcagaggtttgcttacagcttctttcagattccgtctcacggcggacacccttgctgttcggctatgtgcttcgttgttgcctacgcgcacttgggactttcacccattagaaaacgcccatgctgggcaaacaaaagacaggaaacactgaagccttcagatgtctcctgtctttcccgtttccggtcttacataaggctttgtatacggccttttatgcggccattggaagccttatatccagttattcctgcccttccttcttctccttattgggaatgtaataacagttggggcattcatccggatccttctttgccttcttattttgatagatgcagcttggacaatcgtccggagtctcttctatcttatccgtcttgtaaaaattaccggaatattttttatcgctcataccgttgcctccttaaaaacgtggtgtatttctcctctatttatgatatcattataacggaaatcatcatgcatataaaggaggaatcaagattgaaccgaatcattggaaaaaaagctcctgattttcatttaaaagcggtctccggggatggagaagattttattgacgtaagccttgatacctataaaggccattggctggtcctgttcttctatcctatggactttacatttgtctgccctactgagctcacttccttcagcaatgacctgcgtctgtttgaagatgcggatgccagactgcttgccgtaagcacagacagtgagtatacccatcaggcatggattagaaacggcctgggccggattggatatccactgggcgctgataagaccctgtccatgtctgctggctacggcgttcttctggaggaccagggtgttgcgctgcggggcctgttcatcattgacccggaccagataatccgctacagcgtaattcatgacaataatattggcagaaacacccaggaggttctgcgcgttttaaaggcgctgcagacaggttcgctctgcggggctaactggaccattggaagccagcctctgaaagaggacagtaacgctctccctgacgccttctctactgaccaaacagtgaggatctatacccttcccggctgttcctactgccgccaggtcaaggaattcttatccggcaacggaatttccttcgaggaaatcaatctggaaaacgacgcaaaaggacaggctttcatggacagccgaggctacacggcccttcccgtaaccgtcattggcagcaatgagatatccgggttccgtctggataaaatcaaggagcttctgctttaaacgctgaagaatccgcttccaaacattatgtttacaataaaagtaaaaacaaagatagtaaaggccggagggtctatatgggtgtcgcagcagctattaaatgtctttcccacaaaatcaccgaacagtgaggtcagtattccaaatacaatacccataacaggattttgtgaggaaaccgctgccaatgcagaaatcagagcaatgtgatgtgttgccggcatggcaaatcctgtctgggcaaaaatcagtgaaacagctgctattccgaagcagagtaccggataactgcctatgactactgctgatgccccgccatccagaagcgcctgatacacaaagccggttgtggttcccagccccagaccaaggattacattacagagcattcccctgccgctggtaaaatactctctggactcaccaggcgcagcctttcctataaggccgccggagccaaacaccaggcgggcaatgacggctgacaaaatgacggtaaatccgggaagatctgtattcaggtgaagaaccgtcccaatcagataatgaatgagaaaacctattacaccaaacacaccgcctaccagcagtgtagcagggtctgccagtccattcagacaagacagaatgtcagttccgctgcccagcttctttgtcctgcctgcgtaggcggaagccgccacaccaccggcaaaggcgatatggggaccaagataggagccaaaagcaataaatcccactgtcatgtctgcgcctcccgccatggctgccaccgaccctgctatagcaatgacgccggttaaaataaatgcaggaagtgctcccatatacgctcctataattcctcccccaaatgatgctactaatgcaaacaaattcatatgtttgtattctcccttctcttttttaatctgccttcaggcagtccccttgtatgtctccttccctcctttccctgcaattttgttataatgattttaacatccaaagtactgtttttccttatcttatccatacgaaaaacaggtattatcaagacatcttccttcctttttcaagataaaaacggacagcaaaaagccggtgtacatgtctcgaaattacatgtacaccggcttctcaccattcccttatactatttcactaacgcaagtgtttcccttgcaattgccagctcctcattggtaggaataaccagtacgcttaccttggaaccgggagccgaaatcacgatttcctgtcccctctttgaattggcctcgtcgtcaatctcaattcccaggaatgccagatatccgcatactttcttcctggtaatcttgtcgttctcgcctacgcctgcagtgaacgcaatggcgtccacgccgctcattgctgctgcgtatgctcccacgtatttagctacacggtaggcaaatgattccagtgcggcttctgccttcttattgccttcatttgcagcgttctccacatcgcggaagtcgctggaaacaccggacataccgtatacgcctgacttcttgttcagtacgtttaacatctggtcaatgtccatattctctttgtgcatgatgaactgcagggcgcccggatccacatcgccgcttctggttcccatcacaagtccctctaatggagtcagtcccatgctggtgtccacggattttccgttgaggacagctgagatgctggagccgttgcccaggtggcaaaccactgttttaagggaatcataaggacgtccaaggatctctgccgttctctttgacacatagctgtggcttgtcccgtggaaaccgtatcttctcaccttgtatttctcataatactcgtagggaagtccatacaggtatgctttctccggcatggtctgatggaaggctgtatcaaacacacctaccattggagtgttgggcatcagttcctggcaggcacggatgccgatcaggttggcaggattgtgaagaggcgccaaatcgctgcactcctcaatcgccttaactgcatcttccgtaatcagggtagaggcggtaaatgcttctcctccatgaacgattctgtgacccactgcccctacttcgtccaggctcttaatcacgcctgtcttatcattggtcagggcatctaataccatctggatagcctgagtatgggtaggcatgggagaaacggttacctccttttctcctcctgccggctgataagtaatctggcttccctcaataccgattctttcgcaaagtccctttgcaagcacagcctctgatgccgaatcaatcagctgatactttaatgatgagctcccacagttaataactaatatattcattgatatctcctcctttattccggcctattcagcctgtgcctgaacggctgtaattgctactacacccacaatatcatctgcacaacaacccctggataaatcgttaaccggctttgcgattccctgggtaacagggccgtaagcctctgccttagccagtctctgaaccagcttgtatccgatattaccggcatccagatccgggaacatcagtacatttgccttgcctgccacttcgctgcccggcgcctttgaggaagcaacctccggtacaagggctgcatctaactggagttccccgtccagcttcagctccggataaagctcttttgcgattctggtggcttccactaccttgtccacatcgggatgcttagcagatcccttggttgaatgggacagcatggcaacccttgcctccttctgcaccagcagttcaaatgaatcagccgatgatttggcgattgctgccagctcttccggattcgggttctggttcagtcctgaatcggcaaaaataaaggttccatctgctccgtactcgcagtccggaactaccatgaggaagaatgcggataccagttttgtgcctggttttgtcttgacaatctgcaggcatggccttaatgtgtcggccgtggagtggcaggcgccggaaaccaatccgtccgcgtctccgtttttaatcataagacagccgtagtaggcataatcggacatgatgatttcctttgccttttccggtgtcattcccttcgatttcctcagctctacaaataaatcaatatactcctgagtcttctcataggtctgaggattgatcactgttgctcctgatacatccagtcccttgctgtggtctgcaatatcctccggtgttcctatgataatcagattggcgatgtcctcttttaatatcgtttcggccgcctcccaggttctcctgtccatagactctggcagtactatggtctttttgtcagccctggcacgagctttaactaaatcgataaatcccatgataatttacccctttccttggtgtatttaagcatacgtctttattatatactgacagaattggagatacaagccgattttatccaaatattgcactttttcgtatacctaagatcgttctgtgtttattttccgccttttctgctgtgataacaggtgtgaagcagtgtctgtgccagctcgcccatgggttctcccaggaatctttcatacagacgctttatttcccggttatcaagggaactcctgaccattctctgttcatccgcccgatagagagatttaattctttccattctcagccggtccggaaccggcagaacgccgttgtccggctgtccgccgccgctgatacaccctccgggacaggtcattacctccacaaaatcataggagtcaatgttccctgtctcaatcagctgctccgctgccctggtaccgtagataaccgcggcgcgcacatcccgtcctccaagggacaccacggtctcctttacctgatccagccccctgacaggccggtacttaagcagcaggtccattggctcctttccgcttacaacggaatacgccatgcgcagggcggcttccatgacgcctcccgtattgccgaaaatcacgcctgccccgcttccttctcccatcagggagtcaaaggaagatgggtccaggccgtaaaattcaatgcctgattccgtaatccattctgccagttccctggttgtcagcacataatcattatccataagccctggtatgccctggtatattccggaagaacacagttcctccctggatatctcaaacttcttggctgtacagggggcaaccgcgacattcacaatccgtccggggtcaatcccctgctcccgggcaaaatatgtttttatcagtgctccctgcatgctgatgggactttttgcactggacaggcatccaatccgttcaggatgaaatgtttccacatactttacccaggccggacaacagcttgtaaactggggcagcggatggctcccggtcagaaaacgcctgagaaattccgttccttcttccatgattgtcaaatctgccgaaaatgccacgtccagtacataatccgcccccagctccctgagggccgataccatacggccttccacaaagtctccgggccgtcctccgaagcactcccccaatcccacacgaacagatggagccgtagaaaaaacaacaatcttctgcggggcattgattgccctgaccacctctctccagtggcttttaccgcggattgcccgctccggacagactgccgcgcactgcccgcagtggatgcaggaaaaagcgtctgcacttttatctgcccattgccgggcaacgccgatttcttccgagcacacggccaggcaatggccgcagtctgcacagagatcctgatttttttcaattgaaggattattcagggatacgggaacgcttttcatgcacctgtcactcattaaatcccagcccccttctcttgtccattatgactgcctcaatctgatttgctgcttgatcaatctcagtttccacaaaaagctttccgccggtcatctcttccattttattacaaagcacatccatgataaccggactgcctgtcacaaagggcgccaggcccagatgcaggtgaaagccaagggccagggcaaaggccccgtccgccagggcctgttcctccagccattgaggtgcggaaaccacaaccggcagctggggcaaatccacgcccaggattcctgccagttcccctgcaacagcctcaatcctgccgatggcaagacagggaccgaaattgagtacaggaggaatgccaagattctgacacacaccggataagcccgggccggccattccggcagctttgcggctcataaggccgcagttttccagacctccgcaggtacatcccgccgaaagcaccagtatgtctttagcaatcagcttttttaccagttccaccgtaaatacgtcatggcccctggccctcagattggagcagcccacaaccgccgccactccctttattctgtcggcggcaattaaatccgccagaggaacgaagcttcctcccaatgctccttttaaggtcatttccgtaacccctgtaatcgcctcgccgcatccgtgcccttccatgggattctgccgttttcctgtttttacacgccccgcataggatgcaatggctgccgcaatcacatttatgcttacatcctcccgctccgccgcgctatatggcaggtaccgggcgccttttttctttgccacatcatccagacaaagcatggggatggaacgcttttcacagacaggctcaattccgggaagggaacagttgaattccgataccacaaggtcaatgcagccggtcatcagtactgcctcgctgctgtagttattgcccgcatgtccgcagaacacatcttcatagcggcggcctctggcctggaaatcctgccccacacaggtacatccgacaatccggattcccctggctcccgctttttctgccattgcctttatctcaggacgttccagcagttccgtcaggcctgcgaacatggagtgctgatgccctgtaaccatgatgttgatgcattccgggtcaatcacccgcatccccaccgggtcaaagcctaattcaggttcccccatcaggatgtcgttcaggcggttgaccagcacaagtccatatactcctgtggaaatccccagccgcaggcattgggccagcatgtccatgggatctgaattcagattggtggaagtcttcaggactgcattaaatatctcatccttggctcccccgggaagaatgcctgccttttcccataacccggtccgctttccataggcaagcttttttgtaagccgcattttctcatcacagggcctatgcaaatcctccaatactgcctcggccaggcaaagcgccttttcagaatcatccgcaccgtcaatgcccagctcactgcacaggctgcgaagcgcggaaatccccctcaatgttcttcctgtcagtgctgctgattttaattctttggctgcctgttccgccacgtggatgtagcagcctgaaccggctgccacggagcgcaggaaattccttgccgctatggtatccctgtccgcgccgcatactcctttgggtcttgcctttgatatgcggcacggaccatttgaacagagcctgcagcacactccgtccaggccgaaaccgcattttacctcctgttggaccattctgcggtgggaatggtcctcctgcactgattccagaaactcctgcagctttttatccgcactgctgcacattgttctctccatatgcccctccttatgtatttatatcatatggattcattataacatctggccaatcagggttatgtgtacaatccagacgtaaaacaggcaatatccataccccaccgtccaaaaacagccttatccggaaacactttcttgttgcctaggcgtattcgggactttcacccgttagagcgcgcccatgacgcgcaaacaatcgagtaggaggaaggcgattatttcgccttccgacctctcacaccaccgtacgtaccgttcggtatacggcggttcaatcaacttaacatgtaacagccttttcggcgtagtagtcttccatggatacaagaccaaacttagctagtctctctttactgatacaaatgtggagattccagcttctgcacactctggcatatcctttggcatatgaaatgccatgtgccgcatttggcggcagaccaagtttgataagattcttttccctgttctttggcgttttccagtgtttccatatgcacatgcgcagtcgataccgaatctgtccgtccatttttgcgcacagccttttcatgcttccgattttgaaataatttatccaccctcggataagccggttgagtttcccaattttataaccattgcccactccccagctcctgcttgtatatttcttcatctgcgccttgaactttgctgccgctttcgggtgtggtctggctttgtaccctttggcaaatgagtcatagtaaaatccaaaccccagatacttaatgccctttggtttatcaaccctgctcttttccgcgttcactttcagtccaagcttttcctctataaaccgagccacgctcttcattacccgctctgccgcctgtctgctcccgaccattataataaggtcatctgcataccggacgaaatccagcctccttgcttccagttctttgtccagctcatttaacatgatatttgctaacagcggcgagatatttccaccctgcggtgtgccgactaccgtatcttcatactcatcatcaatcattacgccgctgaccagaatctttcttaccaccgatatgacatctccgtcctttattgtccgtccgaaaatcgtcatcagcttgtcatggtctactgtgtcaaagaatttcgctaggtcgatatccactatccagttgtgtccgtcattcatcatttccaatgctttaaggactgcctgctgtgcacaccgcttgggtctgaatccatagctgtggtcgtgaaactgctcctcaaatatcggggtaagcacctgtgccaccgcctgctgtacaaagcggtctactgctgttggcactccaagatttcttgtaccaccatcgggtttgggtatctccaccctgcggactggcttcggcttatacttcctcgtccgcaactgttccttaatgttttcgccgttttccgaaagatatgcgccaagttcttcaacggtcatcccgtccacgcctgccgctcctttattccttacgacttgcagatacgccgcatttagattatccctgcttaatatctgctccatgagactgcttgtgtccatgcgttgtttcctttctgccccttttgcctttgccgcctttgaagtcatcgacaggcgtatgctccggctacgaagtggaacgtacttcaactgattgattgttcagcccttcgctccgtccccattacaggaacttcctcactactatggcttctgctgacttctcacaattcgttgttactacggctaatgagaccgcctgtgagacctccccagttaaggtgcgtgttcttttcctccatgtacctgccgcatttactcgtacttccggcaaccttttggacttcagtgccttttgccaccttatccgtatttccgagccttatatgcggttcctgtccgtcaggtcagaggtttgcttacagcttctttcagattccgtctcacggcggacacccttgctgttcggctatgtgcttcgttgttgcctacgcgcacttgggactttcacccattagaaaacgcccatgctgggcaaacaaaatccgcagggccgtatcttccggcctgcggattcaggtatctggtgattaaattttctcgtaacggtccacgttaatcacaaaaatagtggcgccgcccacatcaactgtcatgggcatagttgcataatttaccatggtggtgcctgatatataaggcatgttgacagtcagcttctgatgctggccgcactcctgcttaatcacatcaatcacttcctgtaccttatcatcttccgcaccaatcatcaatgttgtatttccttttttcaggaacccccctgtggtggaaagtcttgtaacactgtaatgatgctgggtcagctggcttacaacatcatcttcattatcatttctcacaattgcatacactaatttcataagctgtacctccttggcgagtttatatacattagtatagcacattttccagttaagatctgtagttttttagctaatgttattaattcgctttatgaacaatcgaaaccataaaacaggaatatccattagagtttcatcagctctgggctgcgggcctggttcccagggtcacctgcacatcgtgctccacatatgccccgtccaccagggactgcaccgtaagggtaacggctgctccgccctcatagtaggtgagcatctgcttcagatcttccatgctggtgacggactgtccgtcaaacttggtgatgatatccttttcctttaaatcagaggttgaggctgcttggccctccacgattttatagacatagattcctaccggcataccgtacatctgtgaggtggcagcgtcaatgttggttccctgaattcccagataaccctgagcgtcctcggatacagccacgcgcgttttctttgtcatcaggctgtttaagatgtcctgggccttggaaatcggaatggcaaagcccattccctccacttccgtggaagccgtcttggcggcattgatgccgatgacctttccgcttaaatcaatgagcgcgccgccgctgttgcccgggttgatggccgcgtctgtctggatgaaggtcctgttaattcccttttcatctgtgatctcacgatccagggcgcttacatatcccacggtgacggactggccgtatccaagggcgtttcctatggcgatgacctgctgtcccaccttgatatcatctgaattacccagggcagccaccttaatcttgctcatggtgtcggaggggatatcctttaactgcacggcgatgattgccaggtcagatgctgaatccgttcccttcacagcggcgctcacatccttgttgtcaacaaatgtaacctttaaatcggaagccccctccaccacatggttattggtggcaatgagaagttccgtgtcggtctggttcacgatgatgccggaaccgctgctctgcgccgtgtaggtctgcggcattccgaagaaatcacgctgctccacggtcatggtgtcattgatggctacaatggacggcatgacgttttccacgatgcccgacacgtcggtgacagcggatactgccgtggcgccctggtttccggatgcctgtgcattgaccggggctgcctgccctatctggttctgtacctgtgtctcagccgatgtgcctgcggttccatacgcacccgttagcctgtttcccaggtaattcacacctgtcatgactccgcctgatacggttccgaataggaccactgctgccgtgattcccgccaccctttttgcaaagcgttctttgttggaatgattccggtgcttatcgccgccgccctggtatccctgataggaattcccgccatagcagtcctggctgttggcccggccgccatatgggctgaatccggtgtctggtccctgggcatgctgttcgcggggcccctggcttccctgtccctgtgagtactgtccctctgtattctggctctgcgtattctgtctctgccggctcctcccgtcacccgggatagtccagtttacggctgtctcgggtacatccctgtgttccatattttcatttcccaaaccattcatattcttattttcattctcgtacatagcaaagtctcctttcatacgtttctctatttttattaaactgtatgggctgtttcttaattgctcttgctttttataattagtaatatagccgtcatttatggtggaattgtgaaacgattgtggagaatctgtgttctaattattatagatttataaactgaagattaacaaatgccgtctggacggaatggatgtttgaagatataatggacatgataaaataaaccgggaaagaatcaggacaggagtaaaggaacttgggacagtcagaaaagttggaacagccagaaaagttggaacagccggcaaaggtaatcggcatcattgccgagtataacccgtttcacggaggacataaatttcaaatagaagaagcaaaaaaacggaccggcgcaagctggtgcgtcgctgccatgagcggtgattttgtgcagagaggagagcctgcggtctacagcaaatatctgcgcgccagaatggccctttcctgcggcgcggatctggtggtggagcttccctccgcctttgcggtcagcagtgcggaggattttgctgcctgcggcgtggccctgctcacaggactgggagcagtggaggtactgtgctttggcagtgaggacggggatatcagcaggattcagaaggctgccggtatcctggcacaggaaggcggggacttctcctctctgctgaaccttggactgcgaagcggtctaagctggccccttgcccgcaatcaggctctgcttgtgatggcggacagggataaggattttccattaaaaaaagaagaaatggacaagcttctgggctcccccaacaatcttctgggtatcgagtactgcaaggccattctgcgccaggacagtccgcttattccgctgactatccgccgccgggggcagggctaccacgatgaaggcctggagggcggacaggcttccgcctcagccatccggcggacgcttaaaacatgggaactgtacgcagatacggatctgcctccatatacaaaactgacacctgagtccaggacacacatcccaccggcaatctggcccctgtacggccaggaaccctccctggaggccaatgatctgtctgagatactgaacttccgtctcctgtcactgaggcgggagggaacggattatacacaatacggagatatgtcggcggagatggcgcgccggctggacagctgccttctccaacaggtcagctgggaaggccggatagaacagcttaagacacgccagtacacctatacccggatcagccgcgcccttcttcacatggtgctgggcctgaccgccgccagggtgcagtcatacaaagaggccggccgggccccctacgccagaatcctgggattcaggaaggaatcccgggaactgctggctctggtaaagcaaaaaaccgctattcccctgattaccaagacagccgacgccccccgcattctcacaggaacagccctggatatgttctctcaggacatctacgcctcccatatccgccaggtcctgctttcaaaaaaactggggaagccggttaggaatgaatataaccagcccatctgtatattagaataaaaggcaaaatgacaggcccgcggatgcaacgcatggccgcggacctgtcattttattttcatatatcagttgtcttttcacggggctcccaaagctccggggccagcagttctaccaccgtgggctttacatgcaggaactccgccagctcacgtatttggaggccgttgtcccgtttcctgccctgacgcacagcccgaatcaatatattcttcggcgtatgctccatatcaataaattccagaatctgggtccggtatcctctgtattccaggacctgggctctgatggcatctgtgtaaagggccgccatgcgctctttgatcaggccgtattgcagtaccggcctgagaaggctgttttccatctgtccgttgagctcatgctggcagcagggaaccgacaaaatgactctggctccccagttcaccgccttctccagggcgtaatccgtggccaggtcgcaggcgtggagggtgaccaccatgtccaccttctccacgccctcaaaggaggcaatgtccccgtggcagaaggaaagtccatcatatccatactgccgtccgagacggctgcagtgttctatgacatcctccttaaggtccaggccgatgatccgcaccggataccccttcagttccttcagataataatacatggcaaaggtgaggtaggatttgccgcatccgaaatcaataatggcggactcccggccctggtccaggctgggaaggatatcctcaatgaactccaggaaacggtttatctgcctgtatttgtcatagcggctgttcaccaccctgccctcttttgtcatgacgcccaaatccaccagaaagggaaccgggattccctcttccaggatataatgcttcttccggttatgggacagggggccgggagagcctggttcaccggccggctgtatcctgacagactcgggataccgcttcaccttcactgtcaccttgccctttttgcttaccagtataagggcctttccaagtccggatgtaatctccgcctggcggaaggaaccctccagcagccctgtgacatagtctgccgcctcatctttgtccagattgcggtgaaatgcctgctttcccgcctgttcctccgcctggaataccagcctgcccttcatgagcagtggacggattctggacctggagattttgccgctgtctgcggggttgctcataagaacccgctccagagactcatttaagaacagctccagcgcctgtttgatttctttacattcttcctgattcatgtcctgctcctaatccagaagtctctttgcaagggcggggagctggcttaatgactcgatggtgccaaccggcctctctgccctgccaaagccatatgatgcgtgtacaaagggaatcccggccacaccggccgcttcctcatccatatgggtatcgcccacataaaaacaccgttccagatggtttctccggaccaccatacggatgttatctccctttggaaggccggtgttgccgtagcactcaatatcccggacatattcccggaggctgcagctctttaacagcacctcaatatatccgctctggcagttactgacaatgtacagtccatactggcggctgaggcgcgccatgatttcccctgcctccggatacaggactccgggatgggtcagcaggtaatggttctcataggtcatgcattcctccattaccttcctgcactcctcctgggccagccccggaaacaatgtcttaccaatatccatcatggtctttcccatattgtcatacatatcctgagccgtaatcctgactcccaaatgcggataacgggccagcacctcattccaggattcagccacctgggcggccgaatcccagagcgtaccgtccacgtcaaacaatatccctttattcatacccacaaccatccctttcccattcatattcacaggcattgcccctgaaaccatacagaagtcctgatacatccctaattttcagcactgacccatccctttcgcagcaaatccggatagggctccagatgggcataatcgttgaagcgctccagtgtaaaacgtccggatgctccatcccagttaagctccgtgatgctgcagttttccaggctctttccgagaattctccatttattcatgggaattcccagataatgggctgtcatggaacggatgacgcctccgtgggtcaccacagcaacgcgctcatagccgctttctgtcatttccctgaacacaggccgtgcacgccggaccacatccccggcacattccccgcccggataaggcaggtcctcctccataagggcctgctgcgccttgaagtccctgtacttcaccgcaatatcccggtcatccatgccttccatatggccaaaggatatctccctcagctccggccgtatgatatgctccacattccagtagagattggctgcctgagccgtttccacggcccgcagcagattgctggaatacaccacctgtatattttcatgaaacaggcgctctcctaagagagacgcctgcctgtatccttcttcacttaaatccacatccacgttgcacagcttgctgcactgcctgccgtggcgtatcaaaaatagtttcatctgtctgccctccgtccggtttctttcaccccggacagtattaatttttaaagctgtggattggcgccggaattcttccgcccctggttacaaaccgtctgcaggagaatgtgtttacaggcataacaggcgcataacccagcagcccgccgaactcagcagtctcccctaccttctttcccaccacgggaatcagacgtacggcagtcgttttctggttcaccattccgatggctgcctcgtccgcaatgatgcctgcaatggtgctggagggcgtgtcgcccgggatggcgatcatatccagaccaacggaacaaacacaggtcatggcctccaacttctcgatggtgagggctcccatgctgaccgcgtcaatcattccctggtcctcgctgaccgggatgaatgcgccgcttaaaccgcccacataggaggaagccatgacgccgcccttcttaacctggtcattgagcatggcaagagctgccgttgttccgggcgcgcccacgcgctccagtccaatctcttccagtatctcagcaacactgtctcccaccgaaggcgtgggagccagggacaaatcaatgattccaaagggaatgcccatgcgcctggatgcttcctgcgccaccagctggcccacgcgggtaatcttaaacgcggtcttcttgatggtttcacagagcacctcaaagttggcatccctcacctttgccagggcaactttcacaacgcccggaccgcttacgcctacattgatgatggcttcggactcagtcacgccgtggaaggcgcctgccatgaacgggttgtcgtcaggagcattacagaatatcaccagcttggcacagccaagggaatcatggtccctggtggcttcggctgtctcagtcacgattctgcccataagttccaccgcgtccatgtcaatgccggttttggtggagcctacattgacggaactgcacacgcgctcagtctgagacagtgcctggggaatggagagaatcagattcttgtcagccctggtcatgcccttgctcacaagagcggaatagccgccgataaagtttacgcccacttcctttgcagccatgtccagagtcttggctatggtgacgaaatcctcaggacgcctgcaggcggaaccgcccaccagcgcaatgggagtgacggagatacgcttatttacaatggggataccgaaatcagcctcgatatcctggcccgtggaaaccaggttctttgccagggtagtgattttcttataaatcttttcattgagcgcctcaagattgctgtccacacagtccagaaggcttatacccagggtaatggtacgcacatccagcttttcgtgttcaatcatgttgtaggtctcatttacctcgtacatatttacgttaatcatagttctttcgtccctttcttctgatattacaggcccgccctatcctctgggtatgccattagatacggtgcatcttcaggaagatttcttcccgctgaatcttcacgctgacgccgatttcctctccgacctgttccagctcccgggctacttcgccaaaggacttggttatgttctccacgtccacaaccatcatcatgttgaaaaatccctttacaatggtctgggtaatatccagtatattaatctggttctcagccaggtatgtacatacgcctgcaatgattcctaccctgtctttccctacaactgtaatgattgccttattcatctttattctcctcacgcttttgttttattgaaatccggtgaacggatatccatacgttttacagatatataatttcactcatgaagtctctgctggccacggaaatggaaaaatcagaggctccgtaagggcagtctccctcgtcaatctccagacgcacggtctcgtaggccagctcctcgtaattgttttccttgctgagatgtcccaaaagaacctttttcagtctgtcgtggagaacgcagttcaaaagcctgcccgcattttcattggacaaatggccgtggtcccctaaaatcctccgcttcaggtaatagggataagggcctgtctccagcatcctgacatcgtggttggattccagaagcagggcatccagcccctgaagatggtctatgatatactggtcaaaatgtcccatatccgtggccacggccacggacttctccccgttttgtacgcggtatgccaccggattcgcggcatcgtggtcaatcttaaagggcttcacggtcagatcacctaccgtgaaatccaaatccgggcataccggagtcagaaggcccctgtcaaatttgcccaggctgcctgcggccgcaatctcatccagggtttcctgggtcccgtaaatgggtatctcgtacttgcgtgacagcactcccagtcccttgatgtgatccgaatgctcatgggtaatgagaatcccgttaacatcgtttcccgtaagtcctatctcatttaatccctgctgaatccgcttgttgctgattcccgcatccaccagcaggtgggtgctgtcagaacctatgtaaatacagttgccgctgcttccgctggcaatacttaccattctcatgttttacagtcctttgtcttatttattgcattctaattttgtactccatttgttctccaggagccttcggatctgttttctggtgtcctccacagagccgttgttgtcgatgaccgcatcggaaaattccctgaaccctgcctctggcgcctggctgtccatgatgctttccgttttctcccttgtgtaaccgcggctctctctgagacgctccatgcggttctcccttgatgtataaacataccacatttccccgcagttgtcacggaattcttttgagggaatggctgcctctatgaccaccagaggttcggggcaggcaagcgcctccccaaaggcggtattccataccagtggatgggtcaggcggtccacctggaggcgtttatcagggcagccaaagattacctgggccatggcgggacggttgatggttccgtcctcattcagtatggacggccccaggcagtccaccacggcttggtagctctcccgcccgggccgcatcagctcctttgccacctggtccgcctggatgacacggaagccatattcctccttcagtatctccagcacccggctttttccggatcccacgccgcctgtgattcccaatataaacttactgcccgcgggggatgtacttcctatattttccatatcctgtcactgccccttcagataccgttattttccgtgtctttgtttcttcccgtatttcctacttggcatcaaaccaggattttcccacttccgcttccacttccagtgagacccttaaatccgccgcatgcttcatcttatcggtcagaatgtccttaactgtccggatttcatcctgtgccgtctcaatcaggagctcatcgtgaatctgaaggacgattctggatttcaagtttcgctttttcagctccctgtccactgcaatcatggctatcttcataacgtccgctgcggttccctgaatcggtgaattcatggccacccgctctccgaactggcgctgcataaagttggcggacttaagctcaggaatgggccgtctcctgccgtacagggtcgtcacgtagccctgctccttgccctgcttgaccagtccgtccaggaatatcttaacccccggataggtctcaaaatatttatcgatgtactccaccgcctccttgcgggagatgctgagtccctcgctgagcccaaaggcgctgatgccgtatacaattccgaagttcactgcctttgcgttgcggcgctgtagaggagtcacttcatcaaggggtacatggaatacctgggatgcggtgatggcatggatgtcctgggcggaacggtatgcctcgatcagccgctcatcccctgacatgtgggccaggatacgcagctcaatctgggaatagtccgcgtccacgaacacacagccttccttgggaacaaacactttgcggatttccctgcccagggccatgcggaccgggatattctgaaggttcggctccgtgctgctgatgcgtcccgtagccgtgatagtctggttgaatttgccgtgaatccttccgtcctcaccgatataggctgccaggccttccgcataagtggaattcagctttgtcagctggcggtaatccagaattttctggaccaccggataatcaggcgccagcttttccagcacatccgctgccgtggaataacctgtctttgtcttttttcctcccggaagctccatctgctcaaagagaatctctcccagctgcttgggggaattgatattgaactcgtggcctgtctcctggtagatttcctgttccagcttggcgattcccaccttaagcctgtccccatattctttaagctcagcccgttccaccttcacgccctcctgctccatatggaaaaggctgtaaatcaggggcatctctatatctgtatacaggctgtacattccggtatcctttaactgtcctgccaggggtacagcggccttccacgcagtgtaccccatgtagcatacacagtcaacggcattcttctcacccctccacagggcatctcccaggtcctcctttgccagcaggtccgccctggagggcacggtaagtcccagatagtccctggccagatcatcgtaggcataggtatccttaagggggttcagaagatatccggccactcccgcgtcatatacaggatccgtgtccttaagttccaggtacgcaagcatggattttaaatccagcgcccagaactccttaacgccatgattatcctggtcctggttatcctggccctgattattctggtcctggttaccctggctcctgtttttcctgcacagcgccctgagccgctccagaagatattcaccggtaatctgttcccctgccgccagacagtatatatccttctcgcccaggcataaggccaggcctgtcacgggattcagcccggctctggccttttttcccgctttcacttctccgttctcgtcaaagctgaaggacagctgctccacgctctcctttaaagccccgtcgctgcccagtatgagctggaaacctgccagttctgcgcctgctgccctgccaaatatcttatccgctgtccttacatccttcacaagggtgaaatgggattttatatcaggtgcagcggcttcctgggcagcggttttgtcaaaccgggccaggatggacttgaattccagacgcttcatatactggtaagcctccggagtatacagatccccaatccgggcgtccccgtaattaaattccacaggacagtccgtacagatggctgccagcttcttgctcatctgagccatgccgtaatgctcctccagagcctttctggccctgggaggcttaagctcctccagatgggcataggcgttctctatggacttgtactgggcgatgatactggttgctgttttctccccgatggaaggcacgcccggtatattgtcagaggcatcccccataagggccttcacatcaatgaattcctcaggcgtcacctgatactcccgcagcacatcctccgggaaatagtccttaatctcagtcacgcccctgctggttctggggatccgtatcttaatgtgttcatcagccagctgcagaagatccctgtcccctgataccacggatacctggataccctgggcctgacaccgctttgccacggttcccagtatatcgtccgcctcaaatccctccagggtcatgatgggaattcccatggccttcagcacatccttcatcacaggaatctgctcatgaagctcctggggcatgggctttctcgtccccttataggcgtcatacatctcatgccggaaggtaggctcctttagatcaaaggcaacggctgcgtggtccgccttttcctcctccaatatcttcagcatgatatttaaaaaaccgtacactgcgttggtatgcagaccctccgaattcgtaaggtccggtaccccgtaaaatgcccggttcataatactgtgtccatcaatcaaaaccaatttatccattaatataagttcctttctgtctctgtcaccacatcctgaactgaagcaccagcacgaccagcacggcccagaagcacagtgtgttcaccgcatagcgggctgtctccaggattcccagggtgtgcaccctctgccgggacagctccagggctgtctccagagcccccttgatgttataggtgcctgttccctggtccagctggcggatacccacgtccactgtgaagtaaatctccagctcttcccggcattcctcgcaggtctcaatgtgttttaagaattctttcagttccccgtccgtaatgctgccattaatatacggcatcaccagacgctccgcttccctgcaggtcactgccagcacctcctgtctatcattttaatcaaattcttcttacatcatacaataaatcagcttacttttcaatgaaagattgggacgcccatcacctggttaagggcggattcctgtatccctccctgacatgagcctgacgcggccctggttcaggacagtctgcccttcctgtattcccttggagaaacgcctgtcagccgccggaacacatccccgaaataattgccgtccgagaacccgcaggccatggccacaccggtcacggacagatccgtattgcgcagcatatccgatgccttctggacgcggatgtagttcagatactccttaaagcagaggccggtggagcccttgaatttctttgaaaaataggtagggctcatattggcaaatgcagccacctcccccagcgtcagcccttcctgataatgctggttcatgtaccgggccgcactgaccatggcctcctccgtctcctccagcgcgtgcccctccccgcgggtctcctggcagcgtcccaataccacaagaatctggtgcaggagactgcgaagctgtatctggcagtagctgtcaccctgcttttcctcatcctgcatctgggccagcagttcctctatcctagggcggaattccggaggaatggtgcgtttgggctgtgagaagatatggccaaaggcctcccttccgcaaaggcttaagaatgagctgaccgtgtccctggaaaaatagatgccgaaccgctcagcctgccagcttggctcatacagggccttgtggacctcaagaggcggaatgatggttatatcccccggttccagatagtagatgtcctggttgatgaacattttacattttcctgataacagataataaatctcatagtaagaatgataatgaggacgcttcatcacaaagcttgaggaccttctgatacggctgacctgaacgcttttatcctttaaaatcatggtgttgctcatacgcggttcttctccttcaacttctcctttatgaccggaccgtcatggcaaaaaaactgtattttttagaaaatatcccataaaatccgtattattccatctgtttttgttataccataaagccaaccaaaggtaaacaaggaattcgacaaggaaatggaggaatgaccatggctgaaatgaccatgttatccatggctgtgatggctgccaataaaaaaagccgctccttttcggaagcagcagccgggcggaaggacctgtacctgacggaaggaccggcagaggaagcagatgtcatatatcttccggattacagcagtctggattttaggcaggtccgcgagcttctgacagtgggaaaacacatcctgttcggaaccatgggggcggccgatgccggcagcctcaatgcgctggcgcagacagccgcggaacacggcgcagtgctgttggatcatatccaccttgcattcaatccatgtatggcatcattaaagacagcgctgacatgcctgggacccatttaccggatccgtctctattcctgcgaatatgccttctcctgcaagggagtctgtacggttcctgtacgtcccttcacccatattcctcagggaggcgcattgtttcagcggggctacgactgcatctatccccttgtgcatctcttcggcataccggaacagctggatatccagatgatattcacggaaaatggaatggatgcagccggaactgtcaagggaactctaggcagcgcccaggtggagatcgtctattccaagatatcaggaagccatattccaagccttatagagggagaagggggacgcctgctaatccgtgatttacggaatttaagggaagtgacctatttcaaccgttccggtgtggaaaaaccgatggtttctttttccgaagaggcctgccgcgccagggaactggaccgctccatggcctttataaagggaaattgcgactggcgcctccagcttgcatcctccttgcaggcacttcaaatgatggatgaaatccggggtggtaaaaagacgaaagatcttatatgttcttgaaaaattttataagacatttaatgaataaagacagttggttttaaatactcttctgtcctatttttaagattcatttcctatttatggctatttgtgttacactatatattattaatatgtaagggggatatattatcgtgaaaaaacttcatttatttctcgcaactataacaatttctttgttttcctgcatcacatcctttgccggtcaatggcaacaagacagttatggatggtggtatcaaactgatgatggaacctacctaaataatggatggaactgggttgatggaaagtgttattatttctctcctgatggatactgcttgcaaaacacacaaacgcctgatggatatatggtggatgaaaatggagcatgggttattgatggtatagttcaaacacagaatcaacccccaatatcagacacttataaaataggcaatctaactctttctacaccaaatggattttggttttatgaacaaaaggatactatcttttgtatgtttgcttcatatgaccaacaaagagcaatagcagtatattgcagtgatataggcgttgatccacgcgcaaataattacagtgaaaaatatatcgattctgttcttgacgcagcaatgattaatgaaggaggagcatatgcgactaagacatataaacaactttcatctggtgcatggaactgttacggatattcatctgctgaaattttaaatgcgcccggaacattaacagcatatgttcgtatggatggttcatatatacaactaattatgatcgctggtaatttatctaatactgatactgatggtctcatgaatgttctcattaaataatatgatgggatatagatgataacaaataacaaaaaccgcgaaaaccattgattttacgtggttttcacggttccaatttgatgccggcagcgggacttgaacccgcacgcggttacccgcaacagattttgagtctgcatcgtctgccattccgacacgccggcttacaacgctgattattttatcacaggatacatattttggcaagtgttttttgaaaacctttgccatttttcttcaatatttacttcaacgtccatgtggccggacggctggcaaaagactgttaaggcaggtatctgcccgcccttaacagtccctccggcctgttgtcttatctgattgcctgctggccgctggccttatatatttcgtaccattcatagtgctccagacggatatccagggccttaatggccgtatccagcctgtccagcctgttgcttcctgagatagggaccgcccctgccggatgatacataatccacgcgtatatgatggcagacgggtccacgtcatgcttctcggcgattatgtttatggttttcatggctgcggcgcacagactgtcgctggcgtcaaacattcttccccctgccagaggcgaccatatcatgggatggattccggatgcagtcaggtcatccatcattccggaattaaaatgttcaaagcacaccgggttccactcaatctggttcgttaccagctgcccgtttacagctttgttaagaccgttgaatttatgagggtcaaagttggagacgcccatctccccgatttttccttcctgcttaagctctgtcaatgcctttgccgtggactcaaaatcaatgcaggggtcctccctgtgaatcagatacaggtccagatggtctgtgtgaagccgcttcaggctctcctcacaggactgttttaccctgtcatatcttgtatcataatatccaaatccgccctctttgaaaatgccggtttttgataccagctggattttgttcctaatggagcgatcctgttcaaaagcctgccccatcagcgtttcacagagcgcgtctccgtagatttccgctgtgtcaaaggtggtgacccctctctcaatgcattcattcatgaatcgggccagttcttctgcggaccaattccagccgtccagcctccagaatccctgaaccacggctgacaatgacagcccttctgacaatttaacttttttcaccttgttcctcctgttaagaattcaacctttcccaaacacagaagcaatcttaatatccagcttcccgcaccactccctaagcacatcctccttgcagaaggacacggaaaaatcctccagttcaaggtccagaggtatgtctgtcttaatggtggccaattccttagacagcctggcggcggcttccccgcacagttccccctcctcccctgtcttggtcagggatttgtagggagaacggctgattcccaggctgttcttccagaagtcctgcagctccttaagctctttcttatcctgctccgcctcatgtatcacctcataaatattctccacggtgccgtattctcccagcaaaagaggggccgcgctggcaacgcccctgactcccggaatattatccgaggtgtctccctggattcccttcaggtccgtaatctgctccggccacaccccttcctcggaatacacggtctcagccgtaaactcaaaggtcttttccggcaggttcaccgatgccttatccaggccgtaaagcccgtaatacttgtcgtaaagctcctccgccttctcctgtctggcctggaccatccaggcccttacattgtacgcatcactcacaagctgcagataatcatggtccttggtcatcaccaccacgggtacctgctccctgaatttatggacaaggcttcccgcatagtcatccgcctcataccggccgctgtagagcactttaaagcctgcttcctccagaatccgctccatcagcacaaattgctgcttaagaggctccggcgtcctgcttctggtacccttataatcaggatacagttccctgcggaaggtatcccttgtcttgtcaaacacaaatgccatgtaggccggctgctgctttttcagcagggaagccacggccttcagtacccccatgatgccgttggtataagtcccgtccgacgcgtggagaatttttccgtaatgcttttccttctcctcgtcggtcttggcgaacatgatttccctgggtaacactgcataataacaggttgacagcagggatgagccgtcaacaatcacgaattttctttctgacattctgattccatctctttcttacgtattctgtcattgcttgggtcattatccttacctgcggtgatgcctgtcccagattccggcgaacagcagggcggctacaataaataccagcactatcaatcgttccgtctgtcccatatggctcctccttccggagacacgactgtaacggaaagtcacagtttcctcaaaacagtatcatacaccagttttgtcctggcgtcaaagagtacccacagaacatgttccagttcacccggatgctccgccacaaatttcctggcagttcctatggcggtttctgctgccagctccaccggaaaatggtatatgccggtggagacagagggaaacgcaatccgcttcactccattttccagggccagcaaaagggaattccagtagcaggaagaaagcttctcctgctcaccgcatatcccgccgttccacacaggacccacggtgtggatgatgtaccggcagtccatgttgtaggcatttgtaatcttggcctgtcctgtcttacagccgcccaacagccggcattcatgcagcagttcctttcccgcggccctgtggattgccccgtccacccctcctcctccaaggagggatgagttggccgcattgacgattgcatccattccggttatcttcgttatatcacctaatacagtatctatgactgtgttgttttcattcttcatagctggcctcctctgatttctttcctctgatttctttcctctgattactttcctttgattataccatataacccctcagtcctgacaacagtaattcaccgatttttcccgccccgctgtcagccgcaaaggtatggaccaggctggccttatcccttccaaggatgttttccagctccccaaaggaaagcaggcctttgagatacagctttacgatttccattggtccgcttccgatttccgccaccagctctaaatgtgtcatgattcaccttccttctgcctttttcaaccttctgttaaaaatgccggcctaataatatatgcaggcattttccagaatattcctgttggcagccgtataattcctctaaaatcatgagaatctttcgctttccctatggtaaaaattaatcattccattaaaaaagtcagctttttgtaagaaacattacgcttcattacatttcactgacttccgttgcaattcatcctgaactatggtatattcacatcaggtcagaaatgacgctagcccggcagcttccgcagccccatgttgtggaagcgccgggctccccccaaaaagaatctttgttcattattcttcgtatctccagatttgtacctcaccagaatatccctcaaacgtacgcttaataatatcctccacaatactccagtcgccgcccgcactgccgcatcctatcttatatggaaacgccaccgtctcgtttttgtctctggcttccaaaaagctccggatctctcccatggctctttccaatgcgtcataatcggtatagacctgcttttttctgccgtaatcatcctgtccgtacagattgccaatcagaaaccaacgtccgtccttttccacaggctgggcagacacccgccccagcagcttggatgtatccccgttttccttttcaatccactgcttggtaattcttttataggtcttctccacctcgggaaacagcttctttacctgtcctgcgattccatagccgaacgcgccctggcagttcacctggtggcacagaatatctgcctttgaatcaaatatgctgccattgtaatactgaatcataagtttcctcctctatcctatgttatctactgtatgttatctactgtatttcttatcccacatccgcgatttttacttctgtgattttcctgcgcaaaacccacagtctctttcatgatgcaatccgcccgtttatatcatatcccggttctcggtccggcccagcagatagtccacggaacagccgaaatagtccgccagctttaccagtgagaccgcgtttggcacgctccttccgtttttccagtcgctgatgtttcccatggatacatccagctccctggatacctggctggtgctgcccttccgcctgatttccacaaacagattcttcaagtcaatcctgtcctgtaccacattccattcccccaattccagtaaaaagttgtgtcgaatctatcataaatgctgagaagaaaattgtaaataaaaatatgcacaaaggtccttcaataatttgtaagtatttcttcaaactccgtccatgaatatcatgtataatggttacaattcgggtattgcccggaatacaaaggaggattattatggatacaaacaagaagatattgataggagccattggcgctgccgttgtcatcggcggcgttgccatcggcctcatactcagcaagacgccggaaaaggcagacctgtccaccatacatacggaggcagccacggaagcacccaaggagactctacccgccaccacccaggcacaggagacagaggaaaccgcggagtcccaggaaggcgctgcttccagtgtttccgcttccatcgagacttatacatccggaaaggtatccatccagtatcccgcggtggaccagctggacgacgcctcaaagaaggacaaaattaatgaattgttaaagaccaacgccctgtccgtcataaaggccaatgacattgacgaggcaaacgacaccctggatatcaagtgcaaggtgatttccgtggaccgcaaacgtctcaccgccacctacaccggcacgctgtccgcaaaaggagccgcccacccggtaaatctgttctattccaacacagtcaatctgcttcaggcccagaacctgggactggatgattttaccgacgcctataccatggccggatatgtgctcagcgatgatgtgaagttttcaggcatttcatccgatgtggaagcccaggtcctgagctaccgctcttccatggatttggattccctgaccgctgtctttaacagcgcggattttcctctgtcgtcagagacccagtggcctgaatccttcagctatgaaaatcagggaaccatctacttctcactgcccgttccccatgccctgggagactatgtgctggtagcatttgaccccaccaccaaatagtccttttgccaggatttatcttgtgcggattttaagacaaggtccggggttgatatcataagatatttgatatataattatcattaattctaatagataaaggagcagcaaaacttatggataacgtaatggtatttgaccaccctttgattcagcacaagatttccattctgcgcaataaagccacaggaaccaatgagttccgcgccctcatcgaggaaattgccatgctgatgggctatgaggccctccgtgaccttcctctggaggatgtggaggtggagactcccatcgagacatgcatgacccccatgattgccggacgcaaactggccgtggttcccattctcagggcggggcttggcatggtaaacggcatccttgccctggttcccagcgcaaaggtaggtcatatcggtttatacagagacgaagtcacacacgaaccccatgaatattactgcaagcttccaaaccccattgaagagcgtaccatcattgtcacggatcccatgctggccactggcggttccggcgtttcagccgttgacttcatcaaggaacacggcgggaagaaaatcaaattcatggctatcatagctgctccggaaggccttaagcgtctccatgacgcccatcccgatgtacagatttacgtgggacatctggaccgctgcctgaatgaaaacgcctatatctgccccggactgggagatgcaggtgaccgcatcttcggaacaaaataacagggacaattaccaaaacgtcaaaattatagatagaaaccggaagccggacactgcatatcgcaagtccggcttccggtttttatatgttcactgttggttccgtctgtctgttctgtctctctgtctgtactgaccggcttattttactaccttaagcccgccctttcccttctcaggcgcctctggtgcttcctgctctgtttccactttcctggcctcttttacaacaatgttgtcctggcccttgtaaatagagtcagagggaacgcatccgcgtacgctggacagcgggtacacattggaattacgtccaatgacagttcccggattcagtacgctgttgcagccaatctcagcatgatcgcccaggatggcgccgaatttcttgcgtcctgtctccacatccccgtcctcagcatgaacctttacaagacccttgtcagccttcacattggaagtcactgcaccggctcccatatgagccttataacccaggatggaatcgcctacgtagttgaaatggggcacctgcgcctcgtcaaagatgatggagttcttgatttcacaggaattgccgatgacaacgtgctgtccaaggataacacttccccttaaaaaggcgccgttgcgtatctgtacctttggtccgataatcataggtccgcccatggcagtggtaggagccatctgtgctgtcttgtgaatccagatattttttccaatcttcttgtattcgttctccggaaggctggcgcccagactttcgatgaactcattgatatcacccagaacttcccatggatactcatggccctcaaacagcttttcagcaattgtatggcttgtgtctaaaagttctttgattttcatctgttccagtttcataaattaattctccttttttgttttatagaatgcggctgccgcgtcaaaataacctctcatattgtactggttattcatgtgtatgacattgactgtcctgccggcaacaaaacgattcagcttttccatatactcatctgaggttatggaaccttccgcaacataggtgagccccttttcccagctggctgtcagctccggattcagaagctggcggatggactggtccaccacgtcatagaccatttcccctaaaagggatggcgtaataacctgggtctttttgttcaggttcagatacttaatgttaaacagtttcttaagtatctcagccctggtagcgctggtacctatgccgctgcccttaatctgagcccgcagctcctcgtcctctatgagctggcctgcattttccatggccagaatcatggaaccggaggtatagcgcttgggaggtgatgtctcgccttcctttatgttcagctccaccaaagtaagtatatcattttttttcaattctgcaagcatctggagcaatactgtcctgtcaacttttggagaaatagcgttttgtgcatcctcccggccgccgtgtttgtccccgtctgctgttttttcatccccggcaccgtcttttgcctcatcctttgcctcgtcaaaggactcctccaccccgtttttcttcgccaggttcacatccgccaccttgagatatcccggttcggacagaaccttaaaattggcaaaaaaatgttccttcaggcgctccagctccaggctgtatttctgataaaccgccggaggataaaatatgcttaaaaaccttctgcatataacctgatacaccttttcagacaaaggcggcagtcccctcaggtttccaagtccctgtccggtgggtacgatggcatagtggtccgttatctgcttgtcattgacatagcgtgtcttggcgattcccttataggagcccatattcagcacctcatccgcaaatgccgccatgggcgcgtaattcttaagaccgcctatattcttttgaatctccttggaaactgccgcggacaggaccctggcatcggttctggggtaggtgaccatcttcttctcatacagctcctgcactaccttaagcgtctcatccgggctgattttaaacatcttggagcagtcgttttgaagctccgccaggttgtagagaaggggcggattcttggtctcctttttcttctccttggagagcacagttgccgtgagaggcggctctgccgtcaataaggctgccagctcctccgcctgctgcctgtccttaaagccgttgtccttatacagatagggggttccgaaatagcgggaaccttccactgccttccactccgcctcaaaaggaaccggctgcccgtcctttcctgccgcctcaaaggatccaatgaccctgtaaaacggcgtctttacaaaaccgcgtatctcccgctccctgcgcacaaccattcccatgacacaggtcatgaccctgcccacggacagaaccgtaaacttggttcccagataatttgacagggcaggtccgtatttaagggtcagcaccctggaaaaattaattcccatgaggtagtcctccttagcccttaaataggcggaggcggacagattgtcatactctgtctcatccttggcctcgcggattcccctcaatatctcttcctctgtctgggagtctatccacacccttttctgcttcttatcctttaccccggccatctgggccaccaggcggtatatatactcgccctcccgtcccgagtccgtacacacgtaaatggtatcaatatcgggccggttcaaaaggcccttgacgatttcaaactgcttggatacattggttattacttcgtacttgaattcctttggaagaaatggcagtgtctgaaggctccagcgcttaaacttcatgtcgtaggcttccggataactcatggtcaccagatgtcccacgcaccacgtcaccactgcctgctcagactctatatacccgtcgccccgccgtccccgtatcttaagtacttcggcaaactgctgggccacactgggcttttctgctatgtataatgattttgacatccaatccctcatttactttcttcatacgcgccgcaccccggatttatccggcagatttccatggcggcagggcacatattataatagtataccattaaattccctttgccgcaatcaaaaaaaccatgaagcgccaactctggcagaaccctcatggttttcctgcataaactactataacgacattccggaggtaacttccatgcctggaagctggcagtatcagccttatctcaccacatatgattcattcatattttacaatgcaatcggagagcatcccgattacttttaccgtcccatagccgtggcaaaacaggtggtaaacgggaccaactaccggttcatgaccatagccgaaccggagcagtcagacctgactccccattttgccattgtggaaatctatcagccccttgaaggcagggcccatgctgccaaaattacgcctgtttaggcaaaaaacgatagacggtcctggcgctgtactcgtcccctgctttcagcaagggggacgggaactggggcttatggaccgcgtccgggtaatactgggtctcaaagcagaacgcgtggcggtaatcatagcgggctccacccttacccggcatctcatcctgcaggaaattcgctgtataaaactggattccgggcagatccgtataacattccagcacgcggccgctggccgggtccatggcctttgcagccagggccagttctccttcttccttatccagcacccagttatggtcatatcccttcccaaatacaagagcctcaaaatcagcgcctatatcccgtccaatggccttcatctctgtaaagtccatgggagtacctgccacaggagcaatctctcccgtagggatggagacttcgtccgccggtgtatagcgggacgcgttaagccacacctcctgcttcatcacatcgccgctgtcatgtcctgccaggttaaaatagctgtggttggtgaaattggcaaccgtatccttgtcgcagaccatatgataatccagaacaaggctgtcctcgtctgtcagggtatagctcaccgtaatcctggcattgcccggatatccctggtccccgtccggactctccagataaaagtccagcctgctgcctgcctctgtctctgaggacctgcagtcccaaagcctgtcgtggtacaggtccggtccgctgtggagattgttggggccgttgttggcctccagcttataatccctgccgccgatggtgatgacggccccgccaatccggttggcattgcggccaatgggcgcgccaaagtgggcgggattcctgcggtagctgtccaaatcatcgtatcccagcaccacatccgccatgtttccgtccttatcaggcaccaccatggagacccacacccctcccagagtgataaacgaggcggataccccattcttattggtcagtgtatacttgtaaacctctgtaccgtcgggcattttcccgaatgaatttttctcgattgccatgattttctccactccttctccatacagtactaaatatatccccttgctgtcaaaagctctgcgcagagtacggctccgcctgccgcgcctcttaccgtgttgtgggacaaaccgatgaatttataatcatacaccgtgtcctccctcagacggcccacggaaattcccattcctctctcaaagtccacgtccgccgtcacctggggacggttatcctcctcaaggtactgtatgaaccgggccggcgcgctgggaagcttaagctcctgtggaactcccttaaactccctgagtttctgaatcagctgttcctttgtcacctttttcctgaacttcacaaatacggcagccgtgtggccgttcagtaccggtacccttacgcactggcaggtgatgacagggctttccgccttgacgatgacgccgtccttaatggttccccagagacgaaggggttcctgctcgctcttttcttcctcgccgccgatataggggatgatgttgccttccatctccggccagtccttaaatgtctttcccgcgccggaaatagcctgatatgtagcagccaccacctcgtatggctcaaattccttccatgctgtcagcaccggggcatagctctggatggaacagttgggctttaccgcaataaatcccctttctgtcccaagcctcttcttctggaaggggatcacgtcaaaatgctcaggattgatctccggcactaccatgggaacatccggtgtccagcgatgggcgctgttgttggataccacaggagtctccgtcctggcgtaagcctcctcgatggccttgatctcatcctttgtcatatctacggcgctgaatacaaaatcaacccccgcagcaaccttctccacctcatttacgttcatcacaaccagcttttttacagcttccggcatgggggtggccatcttccagcggtctcccactgcttcctcatacgttttgccggcagagcgcgggctggcagccactgtcactacctcgaaccacggatgattctctaaaagtgcgatgaaacgctgccctaccatgcctgtagcgcctaatattccaaccttcagcttcttttccataaatcattctcctcattatcctgattttcccgccctccggaaccgccacggaactgttaggaactgtcccatcgaatccagggtacggcgaatctttccctatcctataccaaacaacgaaaaaaatcaagatttattcgctagaaaaatacatttgtacgtgttgcaaagacactcctgcttttttgtatgcaatatcaccattgcatcaggaaaccagggacaatgcaacctccatcatctgggtaaagctggtttccctttccatggcagaggtggcttccccggtgaccatggagtccgatatggtcagcacggccagggcattggcaccagccgccgccgcgttggcatagagggccgccgcttccatctccacggccaggactcccatatccgcccaggtcattcctccctgcacctgtttgggcgggacatagaacatatctgagctgagcacattgcccacatggaaggacagtccccgctccctggcagcggccacggcccgttccagcaggctgtagctgcacaccggcgagtaatcgcccggcagtcccaacaggcgcacaaagttgctggtggtgcaggctcccatggcaaacaccatatcacgcacatggacatccggcatcagagccccggccgtgcccacccgtatcaggttcttacagccgtaaaagtggatcagctcataggaatagatgccgatggaagggcatcccatcccggtgcccatgacagataccggcctgcccttatagattcccgagtagccaagcatgttcctggtcccgttaaactgctttacgtcctccaggaaatgctccgcgatgtactttgccctcaggggatctcccggaagcaggactgtcccggcgatttctcccttttcagccccgatatggggcgtgggtgtgttggatgatgacatggcatatacctccttttctacagcctcactttgctgcctttcccgtccctcttagccagtttcagacggtttaaatggacttccttacctttataatccacaatgggattctcgccaatcagatacagcttctccagctcctcattcttggacagccggatgcctctgacgcctctggacgcctttttaagcatggatatctcctccagggcaaaccgcaggaacacacctcccgttgtctggatcaccacctcggtctggccctccaccggtatcacggccgccagctcatccccatcctggagcttggtggctgccaccacccggttattggtctcaaattccgccgcaggcacctgctttaccatggccatcttggtggcgaatacaaatatcctgcccttcatgttctccgcgctggtcaggtaaacaatggtatccttggtgccgtcgaatttactcagattttcaatgggcgttcccttgtccctcagcttgccggcgggcacatccatggctttaatctggtacaggctgccgctggccgcaaagagacagattttgtccgtattcagacatttcaccacatgtacctgctcattgtccacggtttcctggttccgatcataggtggacttatctaacagcttgcagtatccgaaccggtccatcacaaaaaccatctcctggacagccacggcgctctcatcgtacactgcctcaggtccatcctcaatcagggtgcgcctgggggtggcgaattcagccttgatggcagccagatcctccttgatgacgcggttcatctggggcctgcttcccaggattttcttatactccgcaatcttccttaaggtttccctgtgctccttttccagggccaggatttccagtccgattaatttatagagacgcatctccaaaatggcggatgcctggcgctccgtaaaggcaagcttcttcgcgtcctcctcaaaacccggcaccttgaaatggatgttggtcacatcgcctgtggtcagacacgccttggcatcctttaagtttttagatcccctcaggatggctatgatcaggtcaatacagtcgcaggccgcaataagtccttcctgcacttcctttttatccatttccttctggagaaggacattgtatttgcgctccgtgttctcatactggaagttgaggaaatttctcaggattcccttcaggttcagcgtctcagggcggccgtccgcaatggccagcatattgacaccgaatgtatcctccagctttgttttcttatagaggatattttttatcttgtcaatatccgcgtccttgcgcagctccagcacgatacggatcccctctttgttggactggttggagatatccaccacatccgtcagcttcttgctctccaccaaatcggccacatccaccagaaacttattgattccggcgccaatcatggtatagggaatctccgagataatcagcttatccttgtccgccttgcgctttccaagctccacctcgaacttgcccctgagtttgattttgcccatgcctgtctcgtaaacctgcggcagctcgctcttattggcaatgactccgccggtgggaaaatccggccccggcatcagctccatcagctcctgcgtggtcacctccggattatcaatatacgcctggaccacgtccaccacctcgcccaggttgtggggcggaatgcttgtgctcatgcccacggcaatgccctccgccccgttaatcagaaggttggggactctgacgggaagcacctccggttccttttccgtctcgtcgtagttgggaacgaaattcacggttttatccagatcctttaggtagacctcctccgcaaacttctccagacgcgcctccgtgtaacgcatggcggctgccccgtccccttctatggagccgaagttgccgtgcccgtccaccagggccattccctttttgaaattctggctcatgacaaccagtgtctcgtaaatggagctgtcgccgtggggatgatacttacccatggtatctcccacgatacgcgccgatttcctgtggggcttatcgtggtccagatgaagctccctcatatcatagaggacccggcgctgtaccggttttaagccgtcccttgcatcggggatagcccttgcagtgatgacgctcatggaatagttcatgtagcttctctgcatttcctcactgtattcagtccgtaatatcttttcagccatgttctaattgtctcctgtctatgcgtcaatctctgcctcgtccgcgtgctcataaatgaactggcggcgcggtcccacctctgtgcccatgagcatctcggttatctccgtagccattctggcgtcctctatctccacccgcttgagaacccggcgctccgggtccagagtggtctcccacagctgttgtgcgtccatctcacccagacctttgtagcgctgcagcgtaaagtcgccggtatgtgttttcctgtaacgctccagctccttttcatcgtaaagatactgttcctccccccgcttagggatcaccttaaacaggggcggcatggcaatatacacatgaccgtcataaatcagttccggcataaaacggtaaaggaaggtgagaagcagggtgtcgatgtggctgccgtccacatcggcatcagtcatcaggatgattttgtcatagcgcagctttgtgatgtcaaagtcattgccgtatccttctgaaaaaccgcagccaaagctattgatcatggtcttgatttccgcattggccaggaccttatccatggacgccttctcaacgttgaggatttttcccctgatgggcaggatagcctggtactggcggttcctggcagtcttggcagagccgccggcggaatctccctctacaatgaatatctcacacctggaggcatcccggctctcgcagtttgccagcttaccgttgctgtcaaaggaaaatttggatttggtcagcatgttggtcttggccttttcctcggcccggcgaatcttggccgatttttccgcacagccaatgactccctttaacacctccacgttgcggtcaaagtaaagctgcagctcgtccccggtcaccgtaaacacggccttggtggcgtcggcgctggccagctttgtcttggtctgcccctcgaagatagggtcgggatgctttaccgcgatgacggccgtcatgccgttcctggtatcggctcccgtaaagttggtatccttatcctttaaaattccaatctccctggcatagctgttaatcagcgccgtgaatttggtcttgaagccagccaggtgggtgccgccctcctgggtaaagatgttgttgcagaagcccagtatattctcctcaaatgtgtccacgaactggatggcggcctccacctccaccttgtccacggtccccttgaaataaatggggtcgtgtaccggcgtcttgccggaattcagctcccgcacataggcaacaatgccctccggctcatggaaggccaccttctccccctctccgggccgcttgttctcatagtaaagggtcaggtttgggtttaagtatgcggtctcgtgcagacggctcttgagccagtccgccttgaaacgtgttttctcaaatatatcgccgtcaggcaggaaattgatacaggtaccggtctcccgcgtctttccaatcacagggagaagtccgttctccagcttgatgacaggacgtcctttttcatattcatcgtgatagatgaagccgtccctgtaaaccttaaggtccatatgggctgacagggcattaactacggaggaacccacaccgtgaagtcctccgctggtcttataagcgtcgttatcgaatttaccgcccgcatgaagggtggacagtacgattctggcggctgatatgccctttttgtgaagtccgaccgggattccgcggccgttatcacggaccgtacaggagccgtctgcttccaaagtcacccacacactgctgcagaatccggccaggtgctcatccaccgcattatcaatgatttcataaatcagatggtttaaccccttggttcccacacctcctatatacataccaggacgcttacggaccgcctccagtccttccagcaccgtaatactgtccgcattatattgttcctttgccattctattcctccatattgctatgtacagatgcgtacatatgtttcatcttattgtattaaaccatatttagattgttttggcaagttccggccatgagaaattcccgtatccggccggatcccctcctgacttccggataacggccggatcaaattcatagaaattattataaatttttacaaaaataagaaaatagacttgaattttccaaaatacatgatataatatcagtgttgtgcagatgtagttcatcggtagaacaccagcttcccaagctggggaggcgggttcgattcccgtcatctgcttttaaagccttgcgtgtgcagggcttttttgttgtcccgaaatcttttatctttccggaacaataacaggccgcccgattcgccgtgaccgggcagcctgttattgtgtataacatttattcacacttcgttcttctatgctcatcccccaaggaatccgaatgtctacagcaccttatccagaaagctcctggtcctttcctccctgggatttccaaacacttcatcgggagtcccttcctccacgatgtttccgtcatccataaacaccacccggtccgccacttccctggcaaatcccatctcatgggtgaccaccaccatggtcatgccgtcggctgccagctgcttcatgacctccagcacctcgcccaccatctcaggatccagggccgatgtgggctcgtcaaacagcatgatgtcgggattcatggcaagggagcgcgcgatggccaccctctgcttctgtccgccggagagctgtcccggatatgcctccgccttgtccgccagccccacgcgggccagcagctcaagagcctttctgccggcttcctcttttcccatgagctttaattccgtgggagctaaggtaatgttctccttcaccgtaagatgggggaacaggttgaaatgctggaacaccattccgatgttttcacgcactttgttgatgttggtgttagggtctgatatgggatggccgtccaccaccacatggccggatgtgatcttctccagacggttcaggcaccgcagaaacgtactcttaccggaaccggaggggcctatcatgcataccacttccccttctcttatctcaatgctgatgtccttaaggacttccagctttccgaaattctttttcaggttatggactgaaatcttattttccataggacactctcctctccacatacttggcaatcctggacagaatcgtgcagactaccagataaaaaagggccacgcagatccagatgggcataaccatggaagcggaattggccgcgataatcttaccgttctgagtcagctccctgggtccgatgacagatacaagggacgtgtccttcagggagatgatgaactgattgatgatggagggcagcatggtcctgaatgcctggggcagaatcaccttgcgcatggccttgccgtaggatagccccagacttctggccgcctccatctggcccttgtcaacagcctcgatgcctccgcggatgatttccgccatataggcccctgcgttaaggctcagggccacgcagcccgccgtaaacgcgccgcctatattgctccactggaaaccataaggcttcaaaacgcttcccacgccgtacatcataatcatgacctgtactaacaggggcgttccgcggatgatgtcaatatagacatcggcaatgagttttaatatcttgaaatccgagaccttgaacaggccgaaaataacacccagaaccgtcgcgcagagcagagatatcacggtcatctgcagggtgattcccagggccttaaaaaatgatgggtaatactgtgttatgatgtttacaatctgcatactatcatccttttctgattaattcgttgacgtgcctcatcccatggatatccttccatgcccatggaacgttatagccaaatttaaagcacttaagcaaaacccggcatggccttcgtgtaattgctttaaattcatccataacccggcggccttgaggcgccggccctgcatttggcaggaaccggcgtctgacagcactgcctgacgattctctccggcagtccttattttgcaatgtaagtattcaatatctcatcgtatctgccgcttgccttgatgttctccagacccttgttgaacatctccacaagctccggattggcgccctttaaggttgcgaaaccataggaggaacccttctccatcggtgtgggaagggtgaggcccagtcccctggagatctcatagccgataacaggataatcctcaaagcaggcaaccgcttcgcctgccagtacagcctgatacatatcagatgagctctcgtactgtgctacctcaaaaccatactgctccgcaatggactccgcaaaggtgcagccctctgtaccaatcttggcagccaccttctgatcctttaactggtcataggaggtgatatcggaatcagccaggacagccatgcctacgccggaatcataatagggctctgagaagtcatatttctgcactctctcatccgtaatggacatgcctgcaatcacgccgtcgcactcaccggcctccagggcggtcactgccgcggagaatcccaccggaacaacctcatattcaaatccctggtcctgagcaattgcctgtaggatatccaggtcaatacctaccatctctcccttttcattttcaaactcaaagggggcaaaggtagtgtctgtgttgatgatgtactttttgccggaggcagccccgctggtttccccttccgccgcggtgtcagccgccgtggtatctgattcagcagccgtctctgccgccgctgtgccggctgctgtggtttctgcgggcttgttggagccgcatcccgccaccgtaaatgccatgatggcagccatggataacgccataaatttcttcataattacttcctcctctactgatctaaataaaataagggtgactttaatacatcctgtctcccttgacctgtgatgcgcctgcatcatcctgtctactatatcacaaagatatgtcaaagtcaacttgttgtaatagttacaatctaaaaattgtatcattttcacaaaagcagggccgcactgtccccatgcacaatgcggccccggatatacccggcctgccttatcttcagaccgtatccccttatctcacaggaaaacgctccacaatccggcctgtatgataggcctccaaaagcatttcaaggtctttaatcttagtcttaagctgtttgcccacatccgtgtcccctaccagcttccggctggacacacgttttacaatggtgctctccgagtgtatatcgctctccttctcaattgcggcctccgtggactcaaagggctcgtgggcggccagaatcagaccgtaggaattataaataagcgtatatccggcgattcccgtttccttctggtaagccctggaaaagccgccgtcaatgaccagcaactttccgccgcatttcataggattttccccgttcttggacttgaccggcacatggccgttgactatatgtccctcctggggagacaggccgaattcctccaggatgcggcccaccgtatcctcattctccagcatacagtaatatgggttcttttcctccctgtgtgtctccttgtcagccagaaaatagcgttcaaaggtggccatcttgtccttgccgaacaacggtgagtcctgatggagccagatataccagcatatatcccggccccttgcccgttccacggggtccactgccatgaacgcctttctcacataaccgtccagacactcatagaggctttttcccttatatttctgtccgtatatgtccacctctttaaagctgccgtccctgtttaaggggatacagccatgatacagaaggtttccgttatataccttgtaaaggcttccctttgccagcaggaagcgcatatgctgctgaagcttttcacaattctgaaacgcggccgcaaggcgttccatgatggcgttctcctccgctgtaagcctgtaagggtctgccgggtcaatggtggggaaatacctgtccagcatctcctgctcgccgccttccagcagtatggtccccctgtccaaatcaatgcggtgcagcaggtttcggccatccaggcagaattccggatgttccctgatgatttggccctccaccttgaactggataatggatatggccttgtgcatcctgatattcagttccgtctcgctggggctgcatgcgttggcccccttgagctggaaacaggcgcacggatcgcttccataggtgtccagggaaaaggttgccagaggcagcagattaatgccgtaaccgtcctccaggatatccagattgccgtatctggcacagatgcggattacatttgcaatacatcccttctgaccggcagccgcacccatccacagcacatcatggttcccccactggatatccagggaatgataggtcatcagcttgtccataattatgtggggccccggccccctgtcatatatatctcccagtatatgtaaatggtccacaataaggcgctgaatcagttcacagagagccacgatgaactcccctgcccttcctacccggataatggtctgtatgatggcattgtaataggactctttatccctcacatccactttttccgtaatcagctcctcaatcacataggcaaactcctggggcagggcctttcgcaccttggacctggtgtatttgctggcagcgcgcttgctcacctcgataagtcggtacagggtaatcttgtaccagtcctcccggttcctggcgtgttccagtatctgggccatcttctccctgggataataaatcagggtggccagggtctgcttgtcctgactgctcagggtgttgccgaacacgtcgttgaccttgcgccggacagctcccgaaccgtttcgcagcacatgggaaaacgcctcgtactcaccatggatatccgtgaggaaatgttccgtccccttcggcaggttcaaaattgcctccagattaatcacctccgtggaagcggccgctatggttggatataattccgcaagccgttccagataccttgtctgcaaatcactcattgctttcctccctcaatacttatatgttgttttactcctccctctccctgtcaacgtaatgcttattttcttcatcaatataatccaggctcagataatcctctgtcctggcggataaattctttttcttcagcgcgctgctcacataggcggcggtcagcctgtaaatgaccgcaaacagaggcaccgcaataatcattcccacaaatccgaacaggccgccgaacagcaggatggaaaacagtacccagaagctgggaagtcccgtggaatcacccaggattttaggtcccaggatattgccgtcaaactgctggagcaccagtataaagataaggaaatacaagcatttcatagggctcaccagcagtatgagaaatgcgctgggcacagctccgataaaggggccgaaaaagggaatcacgttggtcactccgataatcacgctgaccaaaagcacataaggcatctttaaaaactgcagggcaaaaaagcacatgattccaataatcagagaatccaaaagcttcccggttataaaacctccgaatacagagtgtgcaaaacgcacctcgctcaccagccggttggcatccttaacctttaacaggctgtagacaatcttcttgctctgagcggacagcgtgtccttaatattgagaaaatacaccatgacaatgatgccaatcagtatatttttgacaacggtaaccacgcttaagagcccggtggaaagttcaccgatgattttagacatattgggcaccaggtccgtggtcagccagttctggaattccgtggcagcctgctcataaaaaggcatgattgtctgttcgatggtgggattgtcctcaaacatcttcatgagccagaggctcagattattgatattctcacccagactctcctggagaccgataatactggtataaatctgcggaatcaccatccagaacaatccgcagacaatggcaacgagcagcagcaggctcaccagtgtcccggcggccttggccaggctgtctgccgtgcgtccgtccttaatgcagcgtctcagtttttccgccgtataggccctggtcttgttatagatgggcagcatcagataggccagcaccgccccgtaaataatgggcatcaatatggatacaatttttcccacggcctttgaaacgatttcaaaccgagacaggaaaaatccaaaggcaacgctacaggcaaccacggccagcgcagtggtgccccagtatatataatttttaaatcttgggtttttcatacatctttactcctatgtctaaagtattccgtcatttaggcaagtcattcacccctatatcatatcataagctgaaaccaacagcaattaggttttaaattacagtgtctgttccgtaaagattttcacgaaatcttaacagggaggacaaagcgggatttttgtggtatgatattcctatctttgaaaagaggtgttaagacatgtcttatatcataaaaatggccctggacatcaaggccggttttgagcctccggctcccatgacatccccgttagaagcttactgtgccatcggaaccattgccggggcaatgaagcttgggatgccggagcgaaaggatacgctctttgagatgcgggaccagctggatgcggatatggggaacagcgagccggaggacagccggatagcaaaaattcatgccatccttaaaggcttcatacgaaatgagaataccacggaccagatgatggagtacgtgacatacggttatgaaaatgagaggtgacacgaatgggagatgaaacaatggaacataaagtgacttttcatattgatgagaatgccagacggagccttcttcttggaaatgcggacaatcttctccgcgctgccgcagatatacacatgacagtggaggttccggccaatggccctgccgtaccgggatatgcccttaagccggcttccacggataccgcggcagccatggctgatttcgtggtgcctgtgcccgccggcgtaatggagttaatggagagaccggaacaggggtactgttatattaagccgtaaatccttgtaaatccgaaacgccctgcgagacaacgctaccatggcattgtcccgcaggacgtttctcttttcacatatcttctcacattcccagtatggaatccgtatcagggcggatgatgttccaggcggaaatcagggcctcttttagcttctcctcccccgcgaactccatctgtctcttcagagcatatgctgtcttttcttccggcggcattacgtagtagtcgctgtcatcccggtatgtatcgcttaaaaaaatataatttctggaaggcggcctccggtatgcaatatcggctatggaccactgtacatggtatccctcgctgtacacctcattgtagtccacaaaaataataatgtcttccttcttatcggtctggtactttaatgcctctattctcataatcccatcctcccttgcagccgccggctccaccctccatccattgcccgtgcagatgtattaattaaaatctaccataccaccgggtatttttcaatgtaatttacagggttggacttaacgttacagaaagatgaattttcaacagtattatctctgtttcgtcaccagataaagccagggaacattcaaaaaaagcaaaaaaagaaaaaccctgcggacacaaggttttttcaatcaagccactggccggactcgaaccggcgacccacgcattacgaatgcgttgcgctaccaactgcgctacagtggcatccgaacagcaaacgccattcctttgatgcaacaaggctactgcctaagcaacagccttgccatcatgacctgaccgggaatcgaacccgggtttacgccgtgagagggcgtcgtcttagccgcttgaccatcaggcctaaaggtaaatcgaggcgacgtgattcgaacacgcggcctctgcgtcccgaacgcagcgctctaccaaactgagccacgcctcgatacctttggtagtataatacatttattccagaaagtcaaccataaattgtcaaagtttttaaaataattatgataattttcgaaaagccccggttacaggctctgtactatacttctaccgcagtaaatccaaggtcgtctaaaatctccacagccctggcctcacagtccgcatccccgtcaatggtcactgtcttgacggataaatccacggtattcttaatacctgctccgtccagccccttcttaatccggttcacacatccatcgcacatcatttcctcgcacttataagttttcatgttcattctccttttctgttattatatttaacaggccttttctaaagtcccatcattcataaatactgtcataatcatagtttgcataaaaatccgtgattctatcaaaatagaagtccacagtgtcgtctgtaagcatatgctctcctgccgccatccattccagcagctgatcaccggtatcctccgagtagtgaatcacatccatatagtggtccagattgcaggtgatgtcaaactggtcgtcaaaggcaaagagacgtatgtttttgcactccagcagcatgcgggccatgaggcggtatccctccatctgccgttcaaactccccttttgccatcagctcgctgtcccaccagctgatgctgtagggcggaataaaatagtaaaaggtgacctggggattggccctggccgtggccagcacattctgctccagattctccatgaccgtccggcggtcttcttcggtaaaaggggcggtttccgttttgcgcggctccctatcatatgtctttaagacagcttccctgccccagtcccgttccggcgcccagtgcatgtattcgtcaaaggtggtggtccgcccgcctgcctttgtcctggcaaagacacccggaatagtgccgaatatcacttccttgttgaagatataattcacatcattgaaggggtttccatccgtcagatactccggtgaaggggctgccggattccactggtcctttggataaaacaggaagctcctgtccagacccctgcacaccacccttatttgtggattataggccagggcccgtctcacagcctggtccacttccttataatatccgcccgcatatggtatcttgacggatgtgacgccgaaaaggctgtcaaaccggctggccttaaaattctccatcatggatgtgcctgtaagtactgcgtcgtaagtaaaattgcggctgataccgtcattctggtaccgttcgctgtcaatgggatatgccagctgttcaagaggcttgtggtagtggaaaaaaggatccacccagaccaccagtccgcctaacataaccagcatagccagtacggctcccatggtaaaccgcagccatctgccataccctatgttttctgtcccattctcccgcttttgtgtctccaatataatctctcctgtagctgtttattcaaataagccttattagaactggaaataaatgaagccggatattcctgccagggacaggaccgaccagaccagaaggacggctgttcctgctcccctgaggaaggtggggcgaagctctgtctcgcccatattcctggcgttcatcaccagacaaagtacggccccatacagtcccagcactgtaaatacccggtgttctgtcagccagagcggcagttccaccatcttaaagctgtccatgaaggacggattgatctgcatgtttccaaaatccaggagccgtttcaaaaacagctttgcctgggatatgctttctgaccggaagatgacccaggtcaggttgacaaacagaaacgtgaccatccaccggaacgccgtgtgaagattctcccactgccgtttaaagacacggttaagggcctgggccgcgccgtgaagcgccccccacaggataaaggtccaggccgcgccgtgccagaaaccgcttaccagaaataccgccatgatattcatgtaggtgcgcaggtttcccttcctgcttccccccagaggaaaatagatatattttctgaggaaacgggtcagggtcatgtgccagcgcttccagaattccaccggagacagcgctttatagggagaatcaaaattaaggggcagttccaggttaaacattctggaaattcccatggccatgtcacaataaccgctgaaatcaaaatacagctggaaggtataggccagcatgaccaggaatgcgtccgtggaactgagtatctccacctgagcatatccccagtttaccggtcccgcgaaaaactccgctaggataaccttcttgaacagtcctacagccagtatcatcagtccctgggccatgttccgggaatctgccttcaggcgggaagggtccttaagctgcgggataaactccccgtgcaggagaatcggccccatggaaatctttggaaaatacacggtaaacaggaaatactcccaaaaactgtaacctcttgtctccatgcggaaggagtccaccagccacccaatctgctggaaggtaaaaaaactgattcccaccggaaggagaagccttgtgaaggcaatgtcctttcccagaaacgcattcaggttttctataaagaaattagtatatttaaagtaaaaaagcagagccagattggcgaatatgccaaatgccagaaccatcctcccgccaaaccgtccgctcgttatgccatccgtcctgccgtccgccttgccgtcccctttgcctgtctccttcttttcttcccctgacagcatcctggaaacagcccagttaaataccgcgcttcccacaagaagtcccagataccatggattggcgtacgcgaaaaataccagggacatggcggccaggaatcctctggcccatgtatggcgcttcatccggcacagcccgaaatatcctgccagcacagccggaagaaacaataataaaaataaatatgaattaaactgcatgtatcttttcgtttcctttatctcaggtttctatctcaggtttcctgttatttcatcatcttctgcagagtcctgcaaagctcctccaccgtggcgtcgctgtcgccgctgcggatatcatccaccacgcaggacttgatatggcgctccaaaagcaccttgttaaagctgttaagcgctgcctggaccgctgccacctgggtgatgatgtccacgcagtagcgctcatcctccaccatggacttgatgccccttatctgtccctctatccggttcagccggttcatgagcccgcgttcttccgacacttccctatgtttatggcggcaggcgcagccttcttcctgattcatgtattcctctccttttaccttcctgttccccggggaaccgcccatgtccgggacacggacggattcccgcaggtgttttcgcaggtgttttacagccccgcgctacagcttcagattcctgagtctcagggcatttcccaccacgcacactgagctcaaggacatcgcgaatcctcccagcatggggcttaacagcgggccgcccaacaggtacagcactcctgctgccaccgggattcccaatgagttatagaaaaatgcccagaacagattctgttttatattgcggatggttgccttgctcaatttgacaaccctgtagacatccataaggtcagacttcatcagcaccacgtccccggattccagggcaatatcgctgccgtttccaacagcgcagcccacgtcagcctggaccagcgccggtgcgtcgttgatgccgtcacctaccatcataactgtttttccttcattctgcaaccggtttacgacctgggccttgtcttccggaagcacctctgccaccacctggtccacatgggccagcctgccgatgtactgggccgttttctcattatcacctgtaaccatgtatacagccactcccaggctctttatcttttccaccgcctccacactggtttccttgatggtatcggccacgcacacgatcccggccagccggccgtcaatcaccacatacatgggagtctttcctgtattggcgtattctgaggctgctttttccgtatcctgggatacaggcacatgcagttggttaaggagacgccggttgcccaccgccaccttccatcccttccaggccgtgataatacctgccccggtgatactctcaaatgcctcgggcatcgccaggtccatctgcttctccctggcaacctgcacaatggcctggcccaggggatgttccgacatctgttcacaggcggcggcgattcccaacaggtgctcccttttctcatcctcagaagtctgaggttccctggtgctttccccgaaagccccgctccccggcttccacacctgttccaccacggctccgctgatcacatttacatccgtcaccctgggttttccctctgtgatggttcctgtcttatccagtatgacggcatccaccttatggcaaatctccagggcctcaccgctcttaatcagtatgccgtgtccggctccaaccccggttcccaccatgatggccgtgggagtggccagccccagcgcacacgggcaggcaatgaccaggacggccacgaatatggtcagcacaaaggaaagttcctttcctccgaatatccaccacagcagggccgccgccagggcgattcccatgacagcgggaacaaagtatccggccaccttatccgccagcttggagataggtgccttcttgccctgggcatcctcaatcatcttaatgattttggacagggtggtatcgcttcccacatgggtcacttccacttccatagccccattataattcatgcttccgccgattacgcggtcccccggctgtttctccgccgggatgctctccccggtaagcatggactcgtccacgctgctgctgccctgtacaagtataccatccaggggtatccggctgcccggctttatgaggatatgctgccccacagccaccagggaggtctccacttccctctccgtaccgttctcatagagaatagccgtgtccggtgccagctccatgagcttgcgtattgcttcggatgtctttcccttgctgcggctctccatgaacttgcccagcattaccagtgtgaccaccacggccgctgactcataatacagctggtgggccttcatgtgatcccccggaatgcccagagtcatcacaaggctgtagataaacgcgcttcccgtaccaattgccaccagggaatccatattgggattgcccttaagcagagaacgaatgcctaccagatagaacctgcgtccgcaaataaggaccggtacggtcagtatgagctgggccagggcaaaattaagcggattcttatccatctgcatgaaggccggcagaggcagggtaaagggcagcatatgccccatggaaatgtagagcaaaggaacagcaaaacaaatggcggtaatcaccctgcgcttcacagcctccagctgttcctcctgctgctgccattcctcttcttcctttttcttgttctgttcttcctccacaatcaggctggcagaaaaacccgccctggataccttctcacaaatcatttcaggcgtcacccggctctcgtcataggtaatcaccattcggttggttgtcaggttcacattactgctctccacaccgtttaactttctcataacacgctccaccgcgctgctgcatgcggcacaggacattccgtctatgtgatatcgctgcgtggtcatatgtttcactcctttcttataccccacccgggtatattgcaagtatagagcactaactatatattgtcaataggcagtatgccccggaatgaaaatctttactattttacgctaaaaaacagacacatgcatcatgagaatacgcttgtatccttccgtgcatctgcctgtttacctgtctgtttatctatttgtctccttcttcccaatccgtatttcaaatccggtccctgattccggctgacccggaggtcaatgtccccgttccaacactgccataccatatctcaccagagcatagatggtaaggacggatgctatgacggtttcaccagccacagcgtatgacagggcaggtacgggatgtcccatgccgccgagacaggccacggccatcttaagcccaatggctgtaatgacaaaggggaaggtaaaggcggcatagctgggataaaacttcatcttcaggtatgccggtgtctttataagcaccgcaatgtaaatgactgagctgagaatcatcataaacaggaccagccccagtgactttggctgcacggactggatatatccggccaggcaaaggctgacaggcgccgtatagatgcaaaacaacggctgtgccggttccggaacctgtttaaagttcacatagcggtatgtaaccaataccaacagtatgagggccgccgcaaagccgaaccagaaggctgctgttcccactgccagtttatcaaaggctggcgccgtgacacttgccaccgcgattcccacatagacaatgtagtagcttgcaaatacctgctgcattttaaggtgaatcatgaatctggctgtaaaatacaccatgagggcaatgtgcagcccaatgccggcataccagattatcacggcgctgcttcccgcaaagggcttggcatatcctgccagaagcatgactgccatggaaaaggttcctgaaacactggccatgatgggattcttcatgtccccggcaaactgcccggggtataatatgattttgatcacaatcaggatccccaaaatcagggataccgccccgcacagaaggcggactccttccgaataagactggagcagatttcccagggcagccatgcccagcatgacgcctgttgccggaagaggtattttctttatcatcagcgcacactcctattcgtcaatattcgtaagtcccttttcccttatgatcatctcggctaccttgcctgccaccagacccgtaaaatggatacactgttccttatgctcccctgcccccatgtcaaattcctttgtgagaatccggcagcacagcgcgttcttcccgttagccgccttgaaccagtcgtgaagctccttggaaagagccagtgtctgttccacctggggatccttctggaccgtgcggccgaatacaaggccaatggccatgacaccgcctgacacagctccgcacaagcacttggagcgcccgattccaatggggaatccggatgccatggcaatgacctcctccggtacatccatctcaaagttactgcggatggaacagacaactgcctctgaacagaagaatcctccgcggaataaatcctctgcatcctttgctattttggccacactcacttctttctttaaattcatgttacggtaccctccttataagattttctctttcgtccatctcattttacatgaatcccggtggtgtgtcccattgtttttattgatgcaaaaccatatgccatagaaaaatacaatgtccctacatgaccttctgcaaaagccctctgaacaccagcaggagcaccgcaaaaagcgccgctacgaatatcagtgtctttgccactgtcatgctgataaacccgcttacaaggacccctatatagagcatcagcatcatggtgtatcccgtataagcccagcagcgcagccccagcatacggtttctctcatcggtctcataaatcctgcgcttctccttaagttccggattccgcagatactgcaggttgcggatgatggatataaccccggacgcggccaggccaaatccggttccgccgtaaaatcccggcataaaatccctgtaaccctgttccagatacatcaccatggcgcggttcctgaccgcaaaggacagccctatggccgctgcgcccaacaggataaagcatatcccaaacacaatccggttcctgcacctcttctcaaaatcaatggggttttcaataaataactggttcagccacatattcattcctcctcttcaaataaaaatatatcctctatgctttttccgaaaaatcttgaaatcttaaaagccagctgcagggaagcattatacttcccgttttcaagggatattatggtctgcctggtcacgcccagggccaaggccagctcctcctgggtgactttgtcatgtttcctcagttcctgtatcctggtcttcaatcacaccaccctttcctcatttccttttaatcttaaatcatctctgctttttgtcatcgcctgttccgccttttttagtatagcatgctttacatttttagtatagtatgctttacatcaaatgtcaaggctattttacatttttattcccgctgcaaaatccggcagcaaaaagcagcccctggggattccggtacagagaatccccaggggctgccctttgcatttattatgttttatcaaaaaaatccctaattactcataaacttggagacatatccctgaatgaatatgatgagtacaatcaaaggcaggatataactcacataaatcctggcccacacaggaaaatgaattccctccccttcattggcctctgccgtaaatttcttaaagccccatccatagcggctggtgcaaaacagcaggtaaagcatgctgccgataggcagaaggttgttgctgaggatgaaatcctccaggtccagaaccgtgcttccctctcccagggggtcaaagctgccccagagattaaagcccagcacacatggaacggacagaatgatgatggcggctatattgcagagaaccgccttcttaagggtgcatcccgtcaaatccgttgcaaatgaaatgatgttctggaacaccgcgatgatggtggaaaaagccgcaaaggacataaacagaaaaaacagtgtcccccagattctgccgcctgccatatggttaaatacattgggcagggtaatgaaaatcagggatggtcctgctgtggactcaatattgtaggcaaagcatgccgggaatatgatgagtccggccatgaaagccaccagggtgtccagcagggttacgctgaccgcctctcctgtcagcgttctctccttgccgatatagcttccgaagattgccagggctccgataccaatgctcagggtgaaaaaggattgtcccagggcagcgaacacggcttcaccgatacccgcctccgccattttcccaaaatcaggcttcaggtaaaactccagcccgggaccgcctcccggcagaaccatggaatgcacggccagcactaccatcagcaccagcagacacaccatcatgacctttgtaatgcgctccacgcccttctgaaggcccatggcgcagactccgaagcacagcaggaccacaatgaccatgaaccctcccatcagcgcgggattagccagcatactgccgaattcaccggccactgcctctgaatccaggccgccgaaatcccccttaagggtcttaaaaaaataaagcatcatccatccgcccacagtcgtgtagaacatcatcagaatatagttgcctgccatggcgatgtacttggtcagatgccacctgcttccctttggctccagcaggtcaaaggacagggccgcgcttttgcggctggcccttcccactgcaaattccatgactacgatgggaagtcccagtatcagcaggaacaccaggtatacaagaacaaaagcggcacctccgtattcgcctactatataagggaaccgccacacattgcccagaccaatggcgcatcccgcgcttataaggatgaagcccagcctggacgaaaatttttcgcgttccatctatatatcccccgtttcgtaatatatcgcgagttaccggccttttcagacagccggactcaataaaagagcccttaatcctaaggactctttcatatactaccatattattacataaatatcaacctatctctgccctttgtcatagggaacgccggaggccctgggagcctgggagttcctggatgtaaataccaggacaatcagggtggccagatagggtatcatcttgtacacatagctgggaatccctgttgccgccagaaacggtatgccggaataggctgccgccaccgccttcatgaggccgaagaacagggatgcccacatgatttttaccggcttccactgtccgaagataagaactgccagggccaggaatccgtatcctgccacatccgcgttaaaattagtggatgtgggcaccacgaacaccagcccccctaaaccgcccaggaccccggatatcaggacgcctgcatactgcatgcggcagacattgatgcccgccgcgtctgctgcatgggggtgctctccgcaggagcgcagtctcaggccgaacctggtccggtaaagcaccagggtggacagaaccagaatcacgacgcccagatacgtggtgatgtatgtgttccggaataacaatgggccgaaaaacgggatattgcccagcaggggaacggattcaatccggaaggtattgctgaactgaatctgctgcactccctggataaccctggccacaaagatggcaaaggccggagcaaacatgttgagggctgttccgctgatggtctggtttgccttcatgttgatggacgcgtaggcatgaaagaaggcaaagacagctcccgtggccgtggagataaggatggccagtagcagctgcagctgtccgctcatcctgtctcctgtcatgttcaggaacaggatgcccgtaaaggctcccatggtcatgattccctccagggcaatgttgaccacaccgctccgctcggaaaacatgccgcccagggccacaatcatcaggggaatggtaaacagcatggtctgctggaatataaaataaatcacactcatatctggccgcctcctttctcccgttttcggttcatccgggtcaggatggttttcactatcagggcaaaggcgctgaaataaatgatgaccgccacaatgatgtcaatgatttccgtggagaattcaaagagctgcaggtaaaatcccccggctgtcagatatgcgatgaacagcccggaaaacagcactccgatgggatggctcagtcccagcagcgccacggagatgccggtaaagccttccggcgcaagcacatcctttatctcaatgtgcttgccggtgcctgccaggtacagaagtccccctgccatgcctgctatggcccctgctatgaccatgctcatgatgatgttccttttctcgttgatgcccgcatacctgccggcgtcccggttaaagcccaccgccttaagctcatagccaaaggtggtcttattgaggataacccatattagcagcacggcggcaacggccagaaggataccgccgcccacgcttgactccggaaacagcttatccattcccatcttggggatctgcgcggtggctgccacgttcctggattcattgcgcaggttgttaaagagaggcttgtagctcttgacaatccagttcaccatgtacatgccgatatagttcatcatgatggaggcaataacctcgtttacattaaagcaggctttcagaaccccggggaccattccccacagagctccgcccagaatggctgccagcagggccacggcccactgaatcctcccaaggccggtccacatgattcccacatagacagccgcgaaggcgcccacaataaactgccccggcgtgccgatgttaaacaggcccgtcttaaaggcaaagccaacggaaagaccggtcagtataatgggggttgcatagtaaaatacctgtcccacgccctttaagccgtgggtaaaggctcctgtcaggatggtcacaaatcccggcagtgcctgggatggattgcatatcagcagtatgacaaatcctaccagcagtccgatgacaatggcaaacaccgatgacagcacacctacataatcccgttttctccctgtccttttgtttgggctcacagcctctcacctgcctttccttttggctcctggcgtttggaaccggccatgtagagtcccagctcctgtaccgtcacttccccgggattcaggtcagccacgatggttccctcaaacatgaccagaatccggtcgctgagattcatgacctcgtccaattccagggatatgagcagaatggccgtgccggcgtccctctgcttcaccagctccctgtggatgtattcgatggcgcccacatccagtcctctggtgggctggaccgccagcaggatgtcatggtccctggatatctcccttgccacgattgccttctgctgattgcctccggacatactgcgcgtgatggtatccgctccctcgccgcttcgtatgtcaaagtcctcaatcagcttgtcggcatacttataaatttcctcattcttaaggaaaccccagtgctggaacccaggctcaaaatactgctgcagcaccaggttataggccaggttataatccagcaccaggccatgcttgtgccggtcctccggtatatggctgagtccatgggtattgcgggcgcgtatgctctttttcgtcacatcccggccgtttatcaggattcttccccctgcggtttcacccaggccggttatggcgtgcaccagctccgtctgcccgttgccgtcgattccggcaatgcagacaatctccccgctccttacctgaaagctcacgtcgtttaccaccagcttggtatggccttccatatgggatttcaccgaaacatgctctgcctccagcacagtcctgcccggcgctgccggagtcttttcaacagacaggctcaccttgcggcccaccatcatctccgacatttcctccttggtgatggaagccacatccacggtgcctatgtattttccccgacgcagaacagaacaccggtccgccaccgccttgatttcatccagcttgtgggtaataaaaagaatggacttgccttccgccaccagactgcccataatctccatgagctcgtcgatttcctggggagtcaggaccgctgttggctcgtcaaatatcatgatttcattgtcccggtagagcattttaagtatctccacccgctgctgcatccccaccgtaatatcctgaatcagagcgtccgggtcaatgtacaggccgtaacgctcgctgagctccaccacttttttcctggcattgtccatcttcaggaagccgcggctgaccgtctccatccccagtacaatgttctggagcacggtaaaattgtgtaccagcttgaaatgctggtgcaccataccgattccaagggcattggcgtccagaggcccctttatcttcacttcccggcccctgacctttatgattcccttctccggctggtaaaggccgaacagaacgctcatcagcgtggatttcccggcaccgttctcgcctaacagcgcgtggatttccccttttttcagccggagggtgatgttgtcgttggcaatgataccgggaaattcttttgtaatgcctaacatctctataatgtaatcatccatacggttccccctcatataaaaccgtcccggcagcatactccggccgccccaccgcccggcgggatgaggcgtaccgggataacagcagggtgccggacatgccggcaccctgtttgtcatgactatctgccgcaggttatttcaggcccttatacagcccgcattttctgccagtccctactccacaaaggtaacctttgtattggtcaaatcagtcaaatcctttgttgggtcattattatccgccgagaactgtaccagcgtaatctctccgtcagccattttcttgtaaatggcgtcgtactgctcctgggaaaacttctcaaacttggaggtatccatgggaagtcccacgccgttgttggcagcggtaaacacggatgtcctgcctcccgggaagctgccgtcatagaaatcctttactccgtcatacacggagttggaaagaagcttcatggcagacgtgatgactgtctcggattcagtactctggtccacgtccacgccaattacccttgcattcttttcctgcgcggccgccatcacggaattgcccacagcgccgccgcatccgaagattacctctgtgccgttctgataccaggaagccgccatggactgtgcctccggcgtggctgaaaatgcgcctgtgtaattatacatgatttccaggcccgtgactgcatcctcctcagccgcaaactccgcgccctggacaaaaccatatccaaagcggataactgccggcactgccatgcctcccataaatcccagcttcgtatatccgtcctttacagccgcatagcctgccaggaagccggcctggtcctcctggaacagaatgggcatcacattatcatttgtcttataattgtaatccgcatcatggggctccccgtccagcagaatgaagtgcacatccgggtacttgtcctgagccatgtagatgggctcctcaaacaggaagccggggcatactaccagtttggcgccgccctcaatggccaggccgatggtttccaaataggaatctgtagtgccttcctggggctggtaatatttataggagatgctgttctcctccgcatacttcttaaggccctcccatgcgccctggttaaaggacttatcgtctatggtccccagatcggtgaccagggcaagctcatagccttccgcgccccccttggacgaggctgtctttgcagcatctccttcctctgccttggactcttcctttgcttccggtttgctctctgaagccggagcctctgtctgtgcgggggctgccttggtatctgttcctgatgagcctgagcaggctgtcagggaaccagccataaccgccgccagggcaagtgccagtatccgttttttcataagcatgattcctcctcttcaaatatggttgcgtaacatctaagtacaactctaacttatcataaattacaatttattacaaccttttcgtcatatttttgtcatatacgtcggaaagcctgaaggctgcctataaatcaaacagggataactgattggattttggaaggtccttaagcagccccaggtccgacattagggaacatagggttccgtttaccttggaacggttgctgaaatcctcgatggacaggaaaggtccgtccttgaccgcatccaccacagtctcggcagccttttcacccaggccgtcgatgctgctgagggaaggcatcagcttgccgtctatgatttggaaatgccgcgccttggcccggtagatgtcaatgggggtaaagtcaaagccccttgcatacatttcctggacaatacgcatatccctcagggtatcctgttccttcttggacagggtgtccgcccttttcttgtagtccgccagatagtattccagcttatcccttccctggcacatgatttcataggaaaacgcgctggcccggatactgaagaacgcggcgtaataagccaggggatagaatatcttacagtaagcaatacgccatgccatcataacataggcagccgcatgggcctttggaaacatatacttgattttcttacaggaccagatataccagtcgggaacgccgtgggccttcatctcctcctcccactccggctttaatccctttccctttcgcacgctctccatgatggtgaaggaaagtccctgctccaatccctgggcaatcaggtaaaccatgatgtcgtctcgtgtacagatggctgtctgaatggtagcctttccctcctgaatcagggtctgggcattgcccagccacacatccgtaccatgggccagaccggcgatacgcaccaggtcggagaaatacttgggcttggtgtcaagaagcatctgcatggcaaagtccgtaccgaactccggcacgcccagggcccccaggggacagccgccgatatcctccggcatgattcccagggcagaggtgtcctggaacaggctcatgacctcccggctgtccagggggatatcctttactgggtcaatgccgatcaggtcctgaagcatacgtatcatggtgggatcatcgtgtcccagtatatccagcttcagcaggttgtggtcaatggaatggtagtcaaaatgggtggtgaccgtggaggtggtcatatcgtttgcagggtgctgcaccggggtaaaggaatagatttcctcacccaggggaagcacgataatgcctccggggtgctgtcccgttgtccttctcacgcccacgcagccctgcacgatgcggttaatctcacagttgcgcttcctggttcccctctcctcgtaatatttcttcacatatccaaaggccgtcttgtccgccagggtgccgatggttcccgcgcggaaggtctggccctttccaaagataacctccgtataatcatgggccttactctggtattcaccggagaagttaaggtcgatatccggctccttgtctcccttgaatcccaggaaagtctcaaaggggatgtcaaacccgtccttttccaacggcgttccgcacacagggcattccttgtccggcatatcgcatccggccataccggagaactgcttcacttcttcggaatcaaaatcatagtaacggcacttggggcaatggtaatgggggctcagcgggtttacctccgtgatacctgacatggtggccacaaaggaggagcctacggagccacgggagcccaccaggtatccgtcctcattggacttccacaccagcttctgggcaataatgtacataaccgcgaatccgttggtgataatggaatgaagctcccgctccagacggtccactacgattttaggcaggtcctccccgtacatctcatgggccctgtcataacatattttggtcagcgtcttatcggaatcctcgatgacaggaggacacttgtccggccgcaccggggcaatcttatcacacatgtcggcaatcttcctggtgttggtgatcaccacctcgtgagccttatccggtcccaggtaggaaaattcctccagcatctcctctgttgtcctcagatacaggggagcctggtcgtccgagtccttaaatccctggcctgccatgatgattctgcggtatacctcgtcctgggggtccaggaagtggacgtcgcaggtggcgcagacaagcttgttaaactgcattcccagttccactatctttttattaatatcaatcaaatcctcctgggacttaaccgtgttcttctcgtcccgaagcataaacgcgttatttcccagaggctggatttccaggtaatcgtagaaattcacaagcctggcaatctccgtatccggcgcgccgcgaagcagggcctgatacaattccccggcctcgcaggctgaaccgatgatcagtccctcccggtatttctccagcaggcttttgggaattctgggccttctggcatagtactccaggtgggaccagctcaccagacggtacatgttcacacggccgatgtcgttcttggccagaatgataacatggtgggtgggcagcttgcgtatggtatccgtgtccatggtgctgagggcattgagctggtctaaatcatttacatcccggtcccgcagcatcttcacaaaggccgcgaatatctccgctgtggctcccgcgtcgtccaccgccctgtgatggttctggagcgaaatattcagggccttggcaacggtgtccagcttaaagcggttgagattgggcagaagaagcctggctatggcaacggtgtccagcaccgtggggtcaaagggcagctccagcttctccgcaaaatggtctataaatcccacatcgaagctggcattgtgggctacaaggaccgcatcccccacaaactccagaaattgcggcagaatcacgtcgatttttgggtagggaagcaccatggaatcgttgatgcctgtcagcttctctatgtcaaagggaatgggcacgtccggattcacaaaggatgagaatttatccgtaatcctgccgtccaccaccttcaccgcgccgatttcaatgattttattcttctttgggctgaagcctgttgtctcgatatcgaataccacaaaggtatcctgaaaatcctggcccctggaattctctaccagctgtttagtatcgtccaccaggtatccctccaccccgtagaggattttaaaggtatcccccttgtccagggcatggttggcatccgggaaggcctggacacagccatggtccgtcacagccacggcaggcatgccccactgcttggccctcttgatgatgccttttacttcggatacgccgtccatatcgctcatcttggtatggcagtgcagctccacacgcttttccaggctggaatccatgcgcttgctggtaaaatcgtccgctttcttgattcccacaatggatccaagggtcagctcgccgtcaaacttgtcaatggtggtgacacccttcacctttatgaacatacccggattgatgacggatttcacctcgtcgaatatctccggacggataaacatttttaccgtaatggtatccgtaaaatcagacacatcaaaggtaagaatgaatttgccgcttcgaagctcccggttctcacaggtcagcacctttcccctcaaggtaacctcgccgatttctccgtcaatcctctcaatctccatgggctcgtcctcaaagtcccgtccgtagagcacatccgggttgttggaacgcttgaccgaatatttcttgtcgtcgccaaagccgctgtccttatcccttccccagcccttgcgtcctttgttaagctgaggcttatctcccttaaagccctgcttctggccgccgccctggcccgactggcctgtttgtcctgactgggccgtttgtcctgactggcccgtttgtcctgactgggccgcgctgccggatgaaccgggtgcgcctgaaaggacgccgttatctcccggcgctcccccgtctcccacgtccccggaagctgcctgggccatgagagcatcccgcggagcgccctccggtccctggccggcgtccatataggaatcctggcctgacttgccgccttttcctgccagcagctcccggccttccagtccctgggcggagaaggaggctcccattgcttccagctcttccttgtggttctgccagtatatggcctgggcctcccgctccatcttaagctcaatctgttttctgcggtcgctgccctgaggctccacataggcaaagcgcacttccacgggcaggccgcaccgttctgcaaagaccttctctatgacgcgctttaactcccctgtcctgtcccggttcaccatggtgtcctctacggtcaaaaccatgatatcctccttctcaaaggtaatccgggccttgcggaacatggtgtactcgatgatgctgtaatttttgagttccagaagaagactgtccttgtatacatccaaaagctttttgggcgtatactggtctgacagcctgtatttttcctgaatcttgatggccacctgcttatccgggaacagctggtcccggattccacgctccaagtcgtatatattctgtttatgtatcagccttgcgctcttcagataaatgcggatagagcttctatccctggtggtggtcaccttctccacctggaccaggcctaaaagctccttcagagattccgctatattgagggttggaaatacttccaaaaaattctttgccatatatccgtcttccttctatgcttcgcgatcccggctcatggccagcagttcttcccgcagtactgccagaagctcgggctcaggcaccttgcggatgatttcgcctcttcgtatcagcaggccttcgcccacgccgcctgcgatgccgatgtccgcctccctggcctcaccgggtccgttgacaacacagcccatgacagccaccttcacatccagagcgtcaaactccgtcaccatgttctccacctggtttgccaggccaatcaggtcaatccgcgtgcgcccgcaggtgggacaggacaccacctcaatgccgccctttctcagtcccagtgtccgcagaatcagcttggcgctctttatctcctccaccggatctccggtcagcgacacacggatggtatccccgatgctctcatgcaggatgatacccagtcccactgaggacttgatgttgccggacatcagagtgccggactccgtgattcccacatggagaggataatgggtctgcatggcaatcagctcatgggcctttacgcacatgagcacatccgaggatttgatgctgataaccagattgtcataccccatatcctcgatgagcttcaccttatccagcgcgctctccacaatgccttccgccgtgacgcccccatatttttccagcagcgttttctctagggaaccgctgttgacacccacgcggatgggcaccccgtatgctcttgcccgatccaccactgcctgcaccttgtgacggtcaccgatgttgccgggattgatacggattttgtccgccccgttctccatggcggcaatagccagccggtaatcaaagtgaatgtctgccaccagcggaatatgaatctcctttttgatgtcagccagcgctgaggcagcttccatggtaggcaccgccacgcggataatgtcgcagccggcctgctccagcctgcggatctgagccaccgtggcccgcacatcctctgtctttgtattgcacatggactgaatcaggacagggtttcccccgccgatgacccggtccccaatctgaatcacctttgtatctttcctggtcatatatacccctcttttctgaaatgagacaaagcattaaaataatttccgcacatcgttaaacaggataagcaccataagggccagaaggaccatcattcccgccatgtggaccatgccctccttttctttgtctattggctttccccttactgcctcgatgatgaggaacacaagacgtccgccgtccagagccggaatgggaagcaggttcataacgcccaggttggcgctcaagagtatggtaaaattaatcagcatgagtaccacagccgacatgccatagggcgcggtttcatccaccgtggtgtcaatggcgttcacgatccccaccggaccgctgatatcgttgacagacaccataccgtggaacatcatgtaaaaggtgtcaaacacatagtgaatccagtactgtacctcgtaggcgctgtgcaccagaagctgccctatgttctccgccgtgttgggaaccgggttaaactggacccccatcatatactggttgttttccgtggaaaagacaggcgcaagctccgtgctgaaacgttccgtccctcccccttcctccgtcctctcccaggtgaccgtaagagatttctgcggatgggtgaacaggtaccagttaatatccctgtaagaatggacctttctgccgttaatggatttaatcacatcgcctgcctccattccggcagcctgggccggatatccgtccacaacccctgccaggcgggtggtgtcataccccgtaatgccgatgagcaccatggaaaggccgaaggccaggataaaattaaacacaggaccggctgcaaccacggaaatcctggcccatacggacttgttgttaaacgcgctttcatctgtaatcccctcgtcttcccccagcatcatgcaggagccgccaaacggcagtatcttaaaggaataccgggtgccgcctttttcaaagctgaacagccttggccccatgccaagggaaaattcaatgacacctattccatttaactttgcaaacaaaaaatggccgaattcgtgaatcatgataatgattcccagcatcagcatcgcaataatcaagctcatccggctctcacctgtccatccggcgcaccgccgctcatttttatgcgcagcgcgcgcctcctttctgtcttaattccattttgaatttatatagtcgtatgtttcctgttctgcctccagaatctgcgccacatccggggagggcttcacacagtgatgctccatggctccctcaatcatatccacaatggtaaggtagctgatttttctctcaaggaacatggcagccgccatctcgttggccgcgttgaacaccgtcggcagggtgcctcccctgcgtcccgcctcataggccagcttaaggcccctgaatgtctccatatccggcacctcaaaggcaatctgcccaagcttagcgaaatccagccgttctcccggaaggaaacggcgctccggataatagagcgcatactggatgggcagcttcatatcgggtgtgcctaactgggctatgacggccccatcctcaaattcaaccatggagtggatgatgctggccggctgtaccaccacctgaacctggtccatctccaccccgaacagccagtgggcctccatgacctccagccccttgttgaccatggtggaggagtctatggtgattttacgccccatggaccagttgggatgctttaacgcatcctccagccggacctgtttcagctgctccctggtaaatccccggaagggaccgcctgaggccgtgagcagtatcttgtgaaggggattgccggccgcgccctgcaggcactggaagatggcagagtgctccgaatccaccggcagcagcttcacgcccttttccctggcaagaggcatgatgatatgaccggcagtcaccagggtttccttgttggccagggcaatatccttgccggcttccatagctgcaatggcaggacgaatcccaatcatccccaccacggccgtcaccaccagatccgcttccggcgacgtggctgcctccatcagtccctccataccgcttgccaccttcacatccaggtcagccacagcggcccgcagttcctttgccttttcttcatcccagagacaggccagcctgggcttaaactcacggatttgttcctccatcagcttaacattgccgccagcggcaagggctgtcacctgaatatccttattgtatctcaccacttccaatgtctgggtgccgatggaacccgtggaacccagaactgcaatcttcttcatcataacttatattctccctatcctgaagaaatactcaaaaagcccatccttattttaaaaatgtgagggcaaaataaatggccggagccgtgaatatcatactgtcaaaccggtccaggatgcctccatgacccggaatcagatgaccgtaatcctttatgttgtgatttctcttaatagcggaagccgccaaatccccaatctgggaaataaccgccgcaatggcgcaggcaatggcgcaggccgcctggggattatcaagctccgccattctgcctccgaaaaaggacgcatagataaagcccagaagggccgcgccggccacgcctcccacagccccctcaatggatttcttggggctcaggacaggggccagcttatgcctgcccaaaagcatgcctgtacagtaggcaaaggtatcgcagccccaggagcttaaaaatataagccacacaaggtatgccccgtcgttcatgacccttgtctgatacaggaatgacagcatgatgggcacatagcatacgccaaagaacgcgcccgtcacctcctctgtcttatattcagggaaggtaagcacataaagggccatcatcgccatcaggcaggcaataatcataagcgtcacatagcgctgtccctcaaaccacaaaagtccataataggagcaggccgtcacatagcccacaacagccagggaacgccgctgcattcccagagccctgtaaagctcaaataaaccgatgatggatataagggccgtaacggcatatagcaggatacctccctgcccaacaatgacgatggacagaagcaccagtatgataccgctgattaaccgggtcgtaaacatggcattctcctttccctctccttactttacagcgccgaaccgccgctctctcttattatactgcacaatggctttttctaattcctcctggccgaaatctggccaaagacaatccgtcactacgatttcggtgtaggccagctgccacagcaggtaattggacagcctcagctctccgcttgtgcggattaaaaggtccgggtccggcattcccgccgtatccagataggatgcaaacagagcctcgtccacctggtccggttctgcctttccaaggatgcagtccctggccagtccggcagccgccctgcgtatctcgtccctgcctccgtaattcaccgctatgacaaaggtcagccctgtattgtcccgtgtctctgactccagccggttgatgccctctatgatatccctgtcaaagcggcttctgtcgccaatcatctttacacgtacattattggcggacgcgatctttaaaagccgcaccatatagtagcggaacagctgcatcagcgcccccacttcctccgcggagcgtttccaattctcggtggagaacccatagacagtcagatacctgattcccattctggctgcaatctcaacggttttctccacggtgacacagccttccttgtgccccatggtgcggggaagtccccgctttttggcccagcggccatttccgtccagtatcagggccacatgctccggtataatcatatccttatctaatgccattctttctctgcctttcttgtctgaatgtatcttactcgtttccaaaataaagaaacaataagaggcaggagtccctcctgcctcccatattcatttatcacggattacactgtcatgatttccttggtcttttcttccactgccttgtcaaccttctccaccatcttatccgtaagcttctgcatcttctctgtcatctcggtcagatcatcctcagaaatatcccctgccttctccgctttcttaaatgcctcgtttgcatcacggcggatattgcgcagggctaccttcgcattgtcgccttttttcttaacatccttggaaacttcccttctgcgctcctccgtcatctccgggaacaccagacggatacagtttccgtcattggtaggattgatgcccagctcagatgtgaggatggctttctcaatgggcttaagcaggctcttctcccatggctgaatcacaatcatgcgggcttccggaacagaaacattgccaacctgctggaggggcgtgggcgtgccgtaatagtccaccttaatcttgtccagcacatggggattcgcacgtcctgcgcggatggtgccgtaatcagacagcagtacatccagtgtcttattcatcttgtcctcataaacttttaattcttccataagttcctcctgttaatgcagccttccctgctgcttaataatgttcgttttattacgcagtaacgatggttccgttaatccggccctgaatggcgtccgcaatcccgttcttttcattgagactgaacaccgccatgggcatcttatgctccatgcacatgatggacgctgttaaatccaccacagcaagctgtttgtcaatgacttcctgtatggatatggtgtcatacttctttgcctccggattcagcttcggatcgctgtcatacaccccgtcaatggccttggccagcaggatgcagtcggcttccatctcaatggccctgagggcaattcccgtatctgtggaaaaatagggatggcctgtcccgcctgcaaagaatactaccatacccctctcaaaatacttattggccctgtcctttgagaacagctttgtcatggagccgcacgcaaagggcgtaagaatctgtgtcatcatgcctgcattcctgaaaatctcagaaacataaatacagttcataacagtggccagcattccaatctggtctgccttggtcctgtcaatggcctcactggtacggcctctccagaaattacccccgccaatgacgattcccacctgtatacctgcatctacagagagctttacctgcctggccacttccttcaccgtgtcctcgtcaaacccggttttcttagggcctgcaagggcctctccgcttaactttaagaatacgcgtttcatcttcataaagatttatctccttgctgcaatatctgtggctattatagcatagttaggtcaatttgcaaagaaaaagaaattatttatcattttttccatttcgtctcacatttcataaataaaaattgagattttctggcttttatattataataaaggaaatgcgagtgcagacgacagctgcctgcatatgacaaaggaggaaacaatcatgggtttgtttcagcataagaaagaaaaaggggcaacagagcttccgcctacaccgcccgtctttaccccggctgaaccggatgctgccagcgagggccgcgcagcctgcatgaacaggctggaaaccttactgggcgctccctcgtccaagggtgtggttctaaagctctatctggagaatttcaagagtctgaataagacgttcggatatgattactgtgaggaacttctgtcccagataaaaagctatctgaaggaagtagctgagggcaatatataccgttacataggcgtggaattcattatcatattggaacagctctcagaagggcaggcctccgacctggctgatgagattctggaacgtttcggaaatgtatggaagatccgcggagtggactgtctgtgttccgcgcagataggtctctgctcctatcccggccatgccgccaacaccgatgagctgctcaagcgcctggacttggccgtatcggctgcctctgactgcggccccaaccagatggctgtatatgacagcagcatgcatacccagtttgtccgccgccaggctgttgccatgtaccttcagacagccctggaaaagaatgagctggaagtccgctaccgtcctacctataacctgaaggaaggccgtttcacaagggctgattcctacatgagaatcttcattcagggcatcgggctggtgggcgccgctgagtttatgcccatagcagaggattccggtcaaatcagggccattggatattacgccctggaccatgcgggaaaatgtataagcgaactgatgaataccggaagggaatttgactccatctgtatcccggtttctccggtgcttctggttcaggaggattttctggttcaggtgacaaaggtccttgaggcctaccagatacccaagggcaggctggccctggaggtagacgacagtgctctgtccaatgtatatctgaatgtaaacatcaccatgcaggaactctccgacatgggtgtggagctggtactcaacaactttggctccggatgcgctcctgtcagcagtatcctggaccttcctatcaatacagtgaagctggagcgcatgtttgtatggcagctggagaccaatcccaaatcggcttccatcgcaggcggactgattcagattgccagggaactgggcatccatatcatcgcggagggtgtggagacagagaaccagcttaatgccctgaacagctatcagtgcgagtatcagcagggtttctactacgctcccaccatgaagcaggatgtgctcataaaggtcatgggaactaccctggatgagtccagagttaccattgaggaagagaagcttaagatgaagatgtaataccagaaaatgccagaaaacatataccagaaaacgcaggttccgttgaaggattcccgcgttttctgtattatttccatattcaattcaaatatcctgttacggcttccactgggcataaatggattcattgatttttatttctccatcggataaaccaatccccactgtctgcgaagctcatccatccaccccatcatccgcagcgtttcctcatgaggcatttcagggcactccaacgctccctcttcaatcgcccgcaggcaggcctccacctcatattcatacccgctgatctgtttgggggtatcgtaggaagcaatcatgttcctggagcggtcatagatccggatgccctcacagttgttgatgttctccacctctataaatccattgtcaccatagatgatgccccggcggtcgctgagtcccattgcgctgctgcacagaaccgccatcctgccatccttataggtgatggtgatgctgttctgagcgtccacgccggtctctgtcatcaccgcggtgccggttatggtgtccacctcatccccaaacaccatagacgcaaaattaagcgggtagattcccacatccaaaagggctcctcctgccagctcaggacgcataatacgctcttttccgctgatgatatagcccaggttggccgtgagcatatatggcctgcctatgacgccgcttagcagcacgtcgtccagggttttcctcatgggcatataccgggtccagatagcctctgtcaaaagcagtttcttttccctggccagttcaagcacttccctggcctgtgattcattgaccgtaaaggacttttcgcacagtacatgctttccgtggttcaggcataatttaatatgctcataatggtgcgaatgaggcgtggcaatgtacacaagctctaccccggcatcctccaccagttcctcataagatccacaggctttctcaaaaccatacttctgtgcaaattcagctgcccttccgtagtccctggcagccaccgcataattttgtgcgcagtccatctctttgatggtacccgccatgacaccggcaattgacccggctccaatcatacctaccttcatattagtgcccctcctttatttctgtattattccattattttccaattccttatctgcgtttccggtaaccacatggacatgtctgtatggaatggaaatacccgcggcatcaaaatttttcttaatgagcctgcgtatgtcgctgcaggcagtgaaattgtcatcaatgttcctggtccagaccgtggatttaagaatgattccgtcatcccccagttcctttaccgccacattgaccttatttccctctgacgggtccgggcggatgtccaccaccagcggataggaggcaatggtctcccgcattacttcgattgcctgttccaggttgctttcatagctgaccgagacttccatgtaattgcctatataatcattgttatagttgctgttttccacgattgccttattgatgacactgttgggaataatcatacggctgttgtgataggtccggattacggtatggcgcaccgtcatatcctccacgattccggagatacccaaactgcttatattcactttctcccccagattaaaggggcgggaccagctgagcatgacgccgcttatgacgtccgccagaacctgctgggccgcaaaacccacgatggctactaacagagatgaactggttagcagggtagcgctcagcgcctttgtggtattgaaaaggccgctgatgcagataaaggctatgattgtcagcacgaccttggacatgctccggagaaacttaatgtgaatctgttccttccgcttcagaatcatcccgaatatcttgttgagcgcgaacattcccccgctccagaatacaacaatcaccgctatcttaatcaataaaatctgcattcaaatatatcctttcacacttatgtcgttcctattatgccgtactaattatgctgtacttactatgctgttccttctgcataccgcgcatgttatgtaccacgtaccgcattagtagtctaccataccgccccgtttcttgcaatctccatattctgaacgcccccttgtccgcatctgtttctttcttatttcacctttaaaacctctgtttttcatatattcaaaactccctgagcaccagctccgtgatgccctgattgtctcccatctcgattcgtttcaccgccggctccctgccgtaaccgtattcttcccgaagcatgctccgaatccgcgtgcctccgttatatccgtgaatgacacgaatccggtagatgcttttttccgcagcatgtatctgcatatcgattgccttttttgcctcctctgtcagcacttgcttaatgaaagcggcctgcttccggtccacccttgcatagagacttctgacactcagcgctcccaacaatttatccctgtattccctcagagaatcatccttcagcaaataaatcagatagggcagacggtcccaggaattctcctgcatgagaaggagtatcaggtatcttctgacatggtatatggaatacgggcattttcccgcagtctcatcgtttcccctccatttttcctgttccccgtaaagcagtccggcccctggatggatctcatttttcctgatacaaatataagctgccttggatatacagggtctggtatcaaggagatacttccagtagatttcttctccttctgcccccaaacagaaaacggtatatactctttctcacctcgtagtccatggccagaacaaagggcactgacagggaacctgcctcctggtccagccattcccccatgatttccccaatgtgttccacggtccggtcgtcctttctcccggagcgttttaccttatccagggccatcatggccataaacaattcatccagtggacatatctccaggcgggttaatactgcccgggcagcagccaaacgcacctgtcccacccagtcattgaggcggagcacaagaaaggtgagtgcgttcggataaccggctatctcctccagacagacctggcggtaatagccgttgggatgaaagcttcccagggccaatacccagaagtaatccctatccgaccggaaccagtcctttttctcccttatatccagttctttccagtcaatgctccattccatggaggtatactgccggaaatgttcgctgagccgtatcacctgcttcatggtcatatgctccataaccatccctatggcccttcccccgctttgtaccagcttccggtcctctgttgccactgcacagtatacctgggaaagactggacatatccattttttccagtctggatatggcttgggacagcttcgcacgatatgtccttttcagccgttccttctcgtatttttcccaaaacatggaaaacctcccttttgcctgacaaaaacttctttttcctgtattgcccctgactataaaacctccatctcctgagccttatccagccattccatacaggccctgtgccattcctcccaggcctgtttcaggcgaaggcactggttttcatattcatccatccgatcccagactccgccattccagtacgcttcggatccctgccacatggccttaagttccctcacctgtccggtcagatattccaccgcattcccggcaggctccagacgttcggccgccagacgcatgttccattcccggtatgcctcatcctccggtatttctcttaaccggtggcgttccgcctttggcaccgcgcgcatacccgctatcagcgcctgctcctctacttttatctgtgctgccatggaaccgttctggttctccctggccttacgttccagataatgctcatacccaaagggataatacaccacggattgatgttcaaatatcatcaccgcatctgccacctgccggataaaatacctgtcatgggacacaaacagaatcgttcccttataggcacaaaacgcggattccagcgtttcctttgcccggatatccatatggttggtgggctcgtccagaatcaggaaattgggacggctctgcaaaagctccgccagcaccagtcttgccttctctccgccggaaagagtgctgaccttcttctgcgcgtcccttccgccaaacaaatatgcgccaaggatgcttctggcctccttctccgtcaaagcaggaaattgggccgtaaaatgctccagaacagtctgctccgactggatggccccgctgtgctggtcgaaataaccaatggtggtctgatttcccagagaataactcccttccagaggcggcaggaaaccggctatggtctttaaaaacgtggtcttacccgctccatttggtcccaaaagagcaatcttctgtccgcgccgtatacgcatggtaatttcaagcagcggtctttcatatccgattttcaggtgttctgaattgaatacccacttgcttccaggcagcagaggattaatctcacccgtaaagatatgagcatcatcctcctgaggtttttccacgcgttccatgtgctccattgtctttctctttgccctggcaaatgcagccttatttggtttgtgcttaaagcgttccaccagaccttccaggcgggccagctcctcctgctggcgctcatatgcctttttttgaagctgaatctgcttcagcttttcttcccggtaatgggtataattgcccggataccgtctcaatacttttccggacagctcgtagacaacatccgcagcctggtctaggaaaaagcggtcatgggaaaccattaccaccgcgtttttgtaatgtttcatatactgttccagccacccggctgtctccatatccagatgattggtgggctcgtccaggagcagtatatccggtttttcaaggagcaggcggattaaggctatcttggtctgttctccgccggaaaactggcttatccgctttttcttatcctcctttggaaatccgaaaccggtaaagagtgtatcgtactcacgctcgtattcaaagcgttccctctcaaaggtatcccgacagggacatgcctccagaagttcctcctccacggtcctgctcccgtccttaaaagcctgctgggaaagcatccctactgagagctggcgcgaacgccgtattcccgccccctcgcgcctgtcatcccggtccaaggacagttcccctgctacaagttttaacagggttgtcttgcctgctccgttcttacccaccactgctatcttttcatttccacgtatttcaaaatcaatgtgggagagaatcagctcgccgcccactgatacggttccgtttgaaatttggtataacatgactgtgtcctctgtgataaaatattttttgtctttccggtgttttctctggctgttatctgtattatatcatgccgcgcccggttgtagtataaaatactttggattgtaattcctctccaattatcttatactataaacagtttgtatcaacagtcaaaaaggaggacacacatggaacaggtcagacgcggttatgtgccggaggatgaggcatttttttacagggaggaaagcctggggaagctgtgccaggcacaaaaagacctcctgtatctgattgaacgtggatatcccatgaaaaatgcctctgtatttacaggaaatcactatctgctgtccgaacggcagcgccttgctctggtccgggccacctcctcccgccaggcagccgccttacgcagaaaccgggaagtcattggcccggttcctggaaaggaggtgcacatagacggcttcaatattatcataacgctggaaatcgccctttcaggctccacgctccttaagtgtatggatggcactatccgggatttggccggacttcgggggacataccgaatcatcggcaaaacccatgaggccatccgccttctgctgtgccggctgaaggaactggagactgaaagagctgtattttatctggacagtcccgtgtcaaattcggggaagctgagggccctgattttggacacagcacgggaggaagccattgattgccaggtgcacctggtccccaacgcagatgcggtcctcaaggaaacggagcatgtcatcaccagcgatgccattatcctggaccactgcaaaagctggctgaatccccttcccggccttctgtcatcttcccttccgggactgcgctttgtggatttgaccatgcagggcccagagaccgggccgaagacgtcctgagtcaaaaaagagaggtcaggcaagccttcctctctttgtccgtcatatcagctggttatttctttttatctctgtcattgaatgatttaagcaccatctgtgccggatagcaatacgcataaatacagcctttcataagctcctgctcctgctggttcttacatacgctgagaatcatctctttctcatccgcctgcaggtatgcttccccgctgttgcccccgatttcccgaatctccttataaatccgatatttcttgtagtaatccaggccgccgaaatactttgccttaaccggctcaggtacaatgttcagtttataccggtcggacatccttgccagtatgttatgtatcttctcacagttttccctggtgctgttcaaatcaggcatgcaatacaaatagtccatatggccccccttcttctgtaaacaaattctgatgatattatgacagatttttcctttgtatgcaatgagttttttaatccgcattaagacagcattggcgtaatcagattctcctgcgggtcaaaccgcagctcttctggttccgacacagctgtcactcctttgtatcttcccctgaccacatcctcatggtatgcctgtgaaagcatgatctctcccacatgcagcgtattctttattcttattatccggcaattgtcccggtcaatctggttagccgtgcggatacatgcctgaattgcctccttgtccgtggcaaccaccggcggcatcatgccggagcgtagtactgtgctggtaaagcagttaggataaatgacttccggatccagcttttcatagagcctggcggtaatgatgtccgccaatcccattccattggcattgccgtgggagcagtctgtcaggtccaggaaacaggtccgttttacctttagacctcccttgccaaactccgttgaccaggtcccggaaatattggggtccactccggtaccgctgaagtttttccctatctcattgactatcagaacatctgcttctcccaccagaataccgggcatgttggaaaacgcggttttcagaagttccggctctctgtccatgatcgcttccctgggaatggcttctattatggatgtctcatcgtatgcattttccacacagggaatggcaaacagaatactggaacgttccagcaccaccctggcattggccggcagattcctggccatgtttccaagaccgtcgctgtgaacactctccgcgcccgtctgttttcccagtcccaccaccatcatcttgcacacgccgctctcatagggaccgcggaaggcattgtgtggtttgatacggcaggaaatgatgattccgtcagcttcataggcatatttatcctgatacacgggctttccatattgggaatatcccaggagtacggtttccatggaagatttaatgggacatcccatggattcctctgttatatcataccctgccagaagctccttctgtccctctgccagggttcctccatgacttcccatggccggtacaatgaaggggtgagctcccttttccttgcagaaatccacaattgctctggtaatcacattcacgtttgccactccccggcttcctgccgtaacagcaatgctcatccccggcttaattgtctctccaatccccggctttgacagttccctgtacacaaccgccggaatatcctcaggagtaatctttgcgtcatcaaacgcctgctttgcgtgaaacatttttggaatactaatgccctctaacaggcgtgaaacatttcctccctttacaaacttcatttctcccacctctcttcctctctttttattttagggatgcggaatcatgaagtcaaattactcatattaattgttactcttaatttaacttatagtttatatttaattctttggccccactgcgttctgttcatctcaacaatattcttagtaatagccataccaagtcccgtaccttctatgccggatattgttgcgcttgattctctttcaaaaggttcaaaaatatgatttacaaattccggcgtcatgcctatgccgttgtccttaataataaagacataatcaccatatccgtgatgaaaggctgttttctgcataatctgaaagtaagcgcttaatttaagggtggcttccaatccactctccagtatgcaataatggttacagtgcaagtattttactgttcaaattggcttgcaatcccccaaaggaggtaacccatatgtatgccgcaaagaaaacccctgaagaacaataccagttggtattggagtgccgcaggagcggcctgacggactgcgactggtgcaggaagaacggaatcaacccaaacactttttatacctggatcagcaggcttcgtaagaaagcgtgctatgcaattccggaaccttctatttcatctgttccgaatagccgtccggctcaggagattgtcagagtggatattctgtctgaggatcccctccgcaagtcggccccgcaggaaaatactttcattcctgtccaggtggcgcaaaatgccggcccttccattgaaatagcggcgaacggaatcactttccggttttccgggccggttgatgcttccctgtacgaaaaaaccctgcttatgatcggaggtcggctatgatcggtgatatctctataaaaacaaacctctacgtcatctgcggatatacccacatgcgccgctccattgatggcttatgcgccatggtgcaggatatgttccattcccagccagataccatgtccgcctatctgttctgtgggaagcggtgtgacaggatcaaaatccttatcaaagagccagacggcatgtgcctgctgtataagcgtctggacggaaacataaaggggcgtttccggtggccgcgcagccgggacgaggtgaaaccgatcacctggaagcagttcgactggctcatgtcaggcctggagatcgaacagcccaaggcgctgaaaatggctgtataatacttgctgcgggatgccgaaaaccattggttttgctggatttttcctgtatttggtggtataatttaactatcagatttcagaagagaaagccaatgccgcaggacgcaaaagacatccagttcgcagaacttaaggacatgatcgcccaactgaatacgaccattgcagccctgactggaaccattcaggaaaaggatgcggccattgcaaaactcacggaggaatcatctgtggtgaatccatcataccacagtttccgccccctgtcatcatttcgttgcagatcaggcgggatattttttcgtcaggcgtgtcggcatatcccgaacctgtatataccctgaccttgaaaagcgtcccgccgatcctgcggtaaaaaaagccagccgcagaagggctggactttgccatatcattattcaattttactgcctccatcatgcaatcctttcttgcgtatcacgcgcatttcccttataattgttcgtggaaccgttaagtcccctaacttccgtacttagtaaccggatttctgttttatccgtacctcatagcctgctcctcctttcatgtaattgatttttaatcaaaaagaattactccttcactaataggagaaaaacggctataaaaacggaagtgtttttgaaaaaacagctacaaaattttattttttgcaaaggactgaccataaatgccaaaatacgctgaactcccggcattcagggaacaggatttcataacggaagcggacggggatatgctccaccgtgaagcccgcgctcttgctatccggcgtattgaggaaagcgcaaggacagaggaagattttaaggaagtcatcaggtggtgggacaggctggacgctaacagggaacggaaagaaagagaccatgagacggggcgctccaccgttcctttggaatggggtgcagatgaattttatgtttccggcaagccttcctatgacatggttctaaaaaggctcatgcttgcaggtgatttcctcgatatcatatttgaccaccccgaaacaatacatgagcttgtcacggatgcggatctgtcggaaatattgaaggaactaaagccgcatctcaaaaatatgctctattacctgtttgtgcatgactattccacaacagagtacgcggagagtatcggacagtctgaccggaatatcaggggtattcgggaaactgcgctgaaaaagatacggagactttacggcggcgtacttacatacaggaaagaaaacagtctgcctatgacgcttgacgaaaaatatttcttggaaaaccgagtgcgaaaaaagggaagataaatgtatcccgactaaaaaccgcaaacagcttgaccgataatgagtaactgtttataatgtaagaaatattacatcagatgatgtggcaggattgagcggagcagacagcgtgagagcgcctcgttatccctcccgtttaaatcttttttgattgtctgcatggtatgcacctcctttttggacagcataccgcagaaagcgctgacagccaaaacaaagtgggtgcatataagatgtcctcagacggataccaggaaaccgcctgagttatagaccatgcgcaggacagcgggaagccacctgtcacaggatttcctaattgtttccaaaatggccgcgccggccagtccgggattccttaagaggctcatagcctgccgacagtaaccttctgtccgggagaagtttgccataagccagtggtgccgccgccgtatggtttcatcacaaggataatcctcgttcatggtatcctccggcagctctcattgtcacaccgtctccgctcaatcatcagccacaccacctgtccgccatccagctttatgattcgcggtttccagtcacggtggctgacaggggaccggcatatggggcatatacaattttcgttacaatggatagtaattacgccatcccccttgtcagattccgtgtactctgatacaataatcatggttttatcatgagtctcagaggacacaacttagcgggagggtcttctgggactttctctttctgtagaatgtttattgacattatacagagcaagtccctgacattcaagcagagcagtatggatgacaaatcagcttagcaacaacaactttcttacataaagcagatagcaacgagcccttacactttattggctttggcagcacacttgaatttgacttaaattaaataacctgaagcaaaatcctttaaatctcattttcaagatttaaaggattttttgtatattagtttccatttcttcaattgtatacgatccatgatgattacgcgattatgaccatggtggaggcgggattggggatcagtattttggcagaactgatccttcaccggaccaattaccggatcgccctgcggccgacagacccgcccatttaccgcaccatcgccatcggatacaaggacgtccacagccttcccatcgccagcaaacggtttatcgaatatttgcaggcacatattcatgagcttccttaaaaacaggggcagcacacccgctgcccctgctttcactcaagattcccaatatttttctatccctttttccacatctgtaatgctattattataatgattttgattcaaaaattcttccatagacggctcgaatttatcaagcacaaactccttttcgccctctctctgagaataaatccgcacagaagaaaccgcattgcctgcgtctgtcccatatccattaatgatcagaatatcatacctgccgtcctcatccacatcccgaaatgccaccgcccgcacgtcccaaaacggctgagcagtcaccgtattttccgaattatagccggggaaccgatataccacttctccatccttcagcagcataaattccacatctccatcaggatttacagacaaatccgggcgaaaggttgcaaaggctgcattctcccatccatccagcaaatactggtcaaaatactgttcctcaatcaagcgggatgccaattgactgtcattaaccggaacccgctggaagctggaaaaaccgatttcctttgtctcattatacagtccataaaagggaagtttggtcgcatcctcgcgccagccaacccacatcaggaactcctccggcagttctgcaacgggtgtacccggaagataaatcagaatattttccgcgcccgccagcccggaagcctcgctgtatcgatataaaatcccgtccttgatctcttccgtaccgggttctttttcgtaattcatctccgcgattttcatggaataggtgtaggcattgaccttctccggctccgtaaactgaccgctgaaatcgcaccgatactgtataccattgggataattttcgttcaaaacgcccatgtcgctgtcgtaatattcgccggaaaaactgccatcttcatgaatctccaactccgtcctccacgcgcccgcgccgctggaaaaccagaactggagattggaaaaatccgcaaaggaacaggagctttccaattgctcccaatacatgatttcctcgtcatatggagtggtcagataaagcactccttcctcctccacgggcgtaatcacgagccgctccggcgtacctgccgtattctctccaaactcctctccataaggcgtaatatctgccaccaacgtcccgtcctgctccgacaccgtgccgctgcctccataattaatcgcaatataaaaggaaaaactgccgtccgttccgatctccatgccggagccgtagtggatgcccgttccccatatttcctgcagagaaccatattgtttcagatgttcctccgttttgtcagccagccgccaactgcttcccgcaagttgttccatcagcccggaagcttccggaatctgcgtctctgtcagtcccgcctcgctcgattccacatcatcatccccggattccccgtccagcacaatctcaatgggttcctcgacgccgccaatcacatctattttttccatagaacgcccgcattcgctgcccaaaccaactgccaaaaccagccctgccgcagccacaatccattgttttttcttcatcaaaaatccctccctctgatactgtttacctgatatctactttctcatagacactttaaaattcaccttgtagatttatctgcccattctattgcaatataaggttcgctaaaacatctccaatatactcatcatagcctttttcaatatttacaacgaacattttctcatctattaccattgcataacaatcaaaccaatcatattgcgagcctggacagtagtatgtaagaattcctcctatttctttctctgtaaatattccaggattgctatttattactgaacctaattgctcatttccattatttgatgtgtatgtcgccaattttacttgaaatgtaccacctccatcctcgcattcataggttacggctacgtaactctccgctaccgaaacattattatctatcgctgtgaacatggctgcatttgaagaagttgcgcttttactcatttactacccacactattttggcaacccattatgcctagtatgactctattttaataagtttacattattatcctgaaatagtataatacttatagaccatttcaggaggtaaaatgatgccaaagagtgctacgcctatttttctttccaatgatgataagtcatatttaaagtccattctacagaaggggactgttgaagccagagtccacaggagagccaaaatcctcttattaaaatcagatggcatggcagatgaagccattgctgacaaactcgatatttcgagaccgacggtaaagctctgcctgaaaaaatatatggaatcaggcgtaaaagctgccatggaagacagtaaaggccgtggccgcaggattgaaattaccgatgatgcaaaggcatgggtaatcaatattgcctgccaaaagccttccgcattcggcctcccggcagagttatggtatccattgagccttacccgctacatcaattccgttgctgaacaggaaggatatccccgtatggcgacagcatctgagttttctatccggaagatacttaggaaagcaatgcttaatccccataaggtcacctattattgtgaaaaacgggatcctgactttgaaaagaagatgcatgatgtgctggtcatttacaaacaggttgaactccgctttgatgaaaatggaagtttgattccgtttgccggtgatgaagagccggtacatacattatcctatgatgaaaagcccgggatccaagcgattgccaccacaaccggggacaggcccccggctgccagtacggaaaaaatgtccaccgtacagcgtgattatgagtataaacgtctggggacgctctccctattggcagcgattgacctgttgaccggggaagctatcccactggtaagcaatactcataaaagcagcgattttgtaacattccttaaaatattggatgagaaatacccaaaaggggacaaaatacggcttatactggataaccactccgcccatacatccagggagacacaggaatatctgaatacagttcctggaaggtttgaatttgtgttcacacccacacatggctcctggctgaatatggtggaaggctttttcagcaaaatgacccgccagatgttgtccgggattcgtgtaggcccgaaagaggaactaaaggaacggattttgaaatactttgaagaaatcaatgaggttcccgtcccctacaaatggaaataccgcttggacacgattgatctttcggaagaggatgtgggcacaatcgtctatgaagttgtaaatgcgaaagcagcaagtcctgaaaaccaagggaaacgtgcgcccaaagcacggacacgtaagccaagaaatcagattactaccaatgcttaaattgtaagcttatttaaatcgagttatactagaaccattaacataatcaatgttactataattcttttcatattgactccttcaattataatcggtgtttatattccttgatgactacttcttataaaaatgccatttcagagtctgaacactatatatttataaaaagttcaataattgtaacaatttatgcccctctccgtcctgctctccatccgtcatcctctcaccaaatagccggaatccattctgctcctgatagaacctaatcaaaggctccttctcttcacattccaaataaaccataagaccacccagctgtctttgaatttcattcaaagtattaattgcaaaattcatcaacatctttcccgtaatcggatatctaacttcttcactgtaatttcttcccaactgagcaatcaaatacgctgataaggtatagctgcctatgcgttgatcaaggcgacttaacctgcttagttttcgtttcacagaattcaatggcattctttttcagaaaaaactctacatctgaatttttcgggtttgaaaaatcggagagaattttttccaagtcattctctccgattccacccgtttcctctggattcaaaaaatcccttatattaacacaaacaaattgttcctctgatggcattctatccatgcagctgtctccttttttccattaactgtataaactcacctttatctctcaccatacggacagatgttgttctgcgtccaagcggattctgggatgccttctcaactgcatccgcaaatgcttctacttgctggggatcacgaatcacgatattatcggtaatacttgatgtagccattctgtcacctcctctacagcaacgtcttttcctgtttctataaatatcctatcacctcatacaccctttttcaatcagtttatgaatttttcagtttttccatcctctgtccgtattttgtaagcgtcaaataagatggtggatagaaaaataaccactaaccctctatactaaaagggcagtggttatcggcaacgttcctgcaccatgggatcccatggcagatagtcatccagatattccggattttcgagaaatctactccccggcatatctgccaggatatacttgatgtatttcattgcatccaggccgttggctttggctgtttctaccagggtgtagattcccgcacttgcggcagcacccttcggacttccggcaaacagccagttcttccggccgatcacaaaggggcggatacagttctccgcaagggaattgctgatggagcagtttccatccccaagatagttgaagaactcctgccggttgttcagggcatactggaaagcggtatggagcttcgactttggcaattccccggcagagcttatctctgcccacgaccagaaagcctcgagaagcggcttctcgcggtcaagtcgttcttttttcttttgttccgggggaaggccgtccagttccttttctatctcaaacagtttattcagacgaatgactgcttccgcaggttttgaggcttccgggccatggatgtcttttggcagcgcgtccacaaaagcgcggcgcagatgtgtgtaacacagacatctcgtaacccctttcaccccattatacccggaataagcatccgtatggatatatccggtatagccttttaaaaatgtttccggatatttcccacccctccccggctggtactcaaaataccggaccggccgtttgctgtccctggtgctgcagtacacccacatataggaatccgaagtgttcttcctccctggttccttcagcacctgcacgtgggtctcgtcgatatgcagatatccctgctttagaagttcccgtctgagatgggagaccacatgggaaagccagtcccggcagacggccaggagccagtttgacatcgttgccctgcttaaagacagccccatggcttcccattccttttcctgacggtataaggggatgcccagttcaaacttctgatggacaagccatgcgatcgtggaagcagatgcaagggagtgcatgaccggaggatggggcaccggggatttctccatataaggcgtcccgtttttgcggcatgccctgcattcataggtttcccggtaatggtcaaccactttgaggctggcagggatgaactgtacctcggtacgcacaaactcctcaccaacttttaccatggtacctccgcatctctcacagatctgttcactttcatcgatcgtgtggagcactttgctgcggggaatgtcttttatcagtttttcccgctggccggcatatttccttttacgcagatgtttttcgacctccaccagatccggctcatgggcatccggctcagcacaggattccatttcattaaaaagagacatctgtccctctatttcaagggcagacgtcttctctgattttgttccataaagtttacgggtaaggaaatcaacctgctccctaaggagccggacctgctgttccagttctttgatctgcttttggtactcctgctctgtatcctgcatgggctgaaaaccttcctgttctgataaattcattataccataaaacagcaggattttccagcatttataaggaattcccggggttttcaggcttcgggggaacccagctgcggaccgcttttggctgctccgggttcaggccctccagcagccagcggagctgctggtgggagatctgtctggcttcttcgcccgtccgcggccattggaggcggccgttttcgtagcgcttatagaacaggcagaagccgtccccttcataatagactgccttgatccggtccgcccgtttcccgcagaaaaggaacagggaattgctgtaagggtcaagctgaaagctgtactggatgatatccaccagaccgtccagctgttttctcatatctgtgtacccggtgcgcagatagatcttttccacccgggagaggtcacctaacatgatctcaccgctttcagaatggtctccagcaactcgcggggcgtatcttcaaagaggtcaacagtcaccgtaccggcacggagtactgctgcaggagcggcacagggatcctgcctgccgtgaagggatacctccgtaaattccggagccgcatccggaatcaacgcagtctgctccatgaccggcctgcatccatgactctttcggggcagttcttcaagcgccagtttccggatctttgcgatccagtagtaatagctttttagggagatatgatgttgttcgcaccatgcctggtttgttagaccggaggctctgcattgccggatcacgtccagccagtactgaagttttacctgtttatccggagttaaagcggaaatgtccattggtattctcctttatctggatttagagttttgggagggaactctaaaaactctaaccccaagtttacaagagaacgccaaatatttcactacacgttcttatttgacgcttaccgtatttttgctctttcccaattatattataagaatcaccgcattgaaatcatataaaaaaagccgtcacgattttccgacaccccaaaaacgcaaaaagcgctggaaccatgcgggtttccagcgtcttgcttaatcttatgaaattggaattacattcccatctgcttcgcgaactttttgagtactgtgtccggaaatccgcataaaatcaagattttttcggcttttgcaaatatcatttccatgttactacacagaaatgatttgtgtagtaatttttaaaatatatttcttggtggtactacacaaattttaagccatgcagatcattgtatattatgccagacttttgccagccaacctatgcggaggattcaccctgcgaaattttatagctttttcagggctgatttcaggacagtcctcatcgaatgtgataggcatttttcttgcctgctctaattccttcagttcctcttctgtaaatgccagttctttcttcatctcttctgttatactattcatatttaccataatagattcccctctcaaagcttgttgctaatcttgctgatataagtctggtgatatctgtctgtatgccattttcctctgttcttactctttccgtatatacaacaaacaaaatatcattagccgttcctacaagccgatctatatttccaatcgttgtgttagcaccaagtgatagatttcccgctgagatgtcacctatcgtatcataacgatcctcatcatcgctgtgttcctcatcataaagctcgattcgatcataatcaaagaaagcacgtgctgcattcctgaatgatatcccatgcttttggacatttttccgattcttttcttcatcatactcaaaaaccattccacccaaatgaactaccccgcagcaagctgcggggtatcgaaggttgcaacctctacatataatcccatatgctatactgctttgttttctctacgtttttatagattgttttataatttttttcctgtccctgttctttcacatatctacttatgatttgctcattcccatgttcactcaccgttgctacgtaatagccatctgtccagaattctcctccccacaattttttcttcacttgtggacatttcgcgaacacctcccgggctatgatgctcttcactatttggatgattttttttggactatatgcaggcactgactggataagaaaatgtacatggtctttatctgtacctacttccaaaaatcttatttcatacctttcctgaattccctcacacgtttctttgattaccctatctacatcttcatctattactactcttctatattttgctggacatacgaaatgatacatgagtactgatacattgtgtgacttgcgtattgtttcactcatcgcacaatttctcctttcctttttcctctagtatatctcttcctccatgtcttgaaaaagtttgttacgcagcaagctgcggggaattaaaccctctttttgattaaacttagtaatatcatcctccaaaaatgtttcatctaaatgcgtataaatatccatagttgttgatatttttgcatgccccattaacttttgtgttgtctttacatccatttttgcagcgtaacaaatggaagcaaatgtatgtctcagcgcatgtggataaaccctttcaaacaaaaccggttctctctgttctctttttgcttcataagcttctttggtattgatggaatctaccactttattgattgttttttcagcgttatgcctgatcagcggggaacccatggtggtaacaaataccagatcttcaaactctccctttccccgatatctgtccttcagttctctttttaggaaatcaacctgctctttctgctgaaggaacatctctttgacctggcccataaaaggaattttccgataggaattagtcgtttttagtgttgtgagcgatatcagtttttcccctgcttatactctgctgacagtgcctgtttcagctctatatatccgccttccagatggacatcctcccatttcaatccgcctacctctccaatacgcattcctgtatagatcataatataatggagcggaaaccaaaatggaacctcccaaaatgcaaagtttgcaattcgggtttgtgtaacgggttttacacaaatcactacacaaattactacacaaatttaataccagaccacacaatttagcaccagtctgcaacactcacaaaaaaacccggaacccctgattttatgcgggttttccgcatgtatcaggggttccgggataaaggttgcaattgggcttacattcccatctgcttagctacctcagcagcaaagtcctcgttcttcttctccaggccttcgccggtctcgaaacgtacgaacttctttaccttgatagaagcgccgttagcctttgctacagctgcaacatactgggaaacgctctgcttgccgtcttctgcctttacataaacctgatccaacagacaggtttctttcagctctttgttgatacggccctttaccatgccctcaataatcttgtcgttggcatccggcttctcattcttagctgcggctgtaaggatttctgtctcttttgcgatgtaatcagcgcttacttcgtctctgctggtgaacattggctttaaagctgctgcctgcatagccacattctttgccatatccttaatgtcatcgttgacaacatctgtctctacgtctaccagaacgccaatctttccgcctgcatggatgtaggatgcgacaaaaccatttgcctcctcaacctgctcaaaacgacggatgttcatgttctcgccgataatggcaatctgggaagcaagtgcctcctttacggacaaggtctcgtccttagcccatctctcctccatgaatgcgtctaaatccttagcggaagtggtaagtgcctgtgctgcaacatctgcaacatatgtccggaacttctcgttcttggcaacaaagtcagtctcagcgttaacctctacgataacagccttcttctcatcagcagctaccgttgtagctacgatgccttctgctgcaatacggccggccttcttggctgctccggcaagtcccttttcccttaagaactctactgccttatccatatctccgtcagtagctgcaagagctttcttgcagtccatcattccggcaccggtcatctctcttaactcttttaccattgctgcggttactgctgccatttcatcttcctccaattttaaagttttaattaagcctcaacagcctctgtctcgaaagcctgggcaggaatctcgatttccattgcgccctctaaaacttcgccctgctttgcttcgataacagcatcagccatcttggaaacaatcagcttaacggctctgatggcatcatcattgccaggaattacataatccagttcttccggatcacagttagtatcaacaataccgattaacggtatacccagtgtgtgagcttcctgtacgcagatgtgctccttcttcgggtcaacgatgaagattgcatctggcagtctcttcatatccttgattccgccaaggtttctctctaacttgtcccactctttcttcagggcgattacttccttcttaggaagaacatcgaatgttccgtcctgagacatggtctcgatttctttcagtctgtcaatacggctctggatggtcttgaagttggtcagcatgcctcccagccatctctcgtttacaaagtacattccgcagcgctctgcctcagccttgatggcttcctgagcctgcttctttgtacctacgaacaggatggtgccgccgtctgcagcaatgtcggatacagccttgtaagcctcatctaccttgcctacggacttctgtaagtcaatgatatagataccgtttctctcggtatagatgtatggagccatcttagggttccatctccttgtctggtgaccgaaatgtacaccagcttccagtaactgcttcatagaaattacgctcatgttatttacctccatttggtttttagcctgctccgtcgcgtatgggagttcaggctcttccgcctgcttctgacacttcccggaagacctgccaaactactggtcaggcaccgtcccgcagaatccacagacgtgttttttgtcagcctttcaaatatatcacaaaatatggcagcttgcaagcacttttaataagttttcccgcaaactgccatatatttatctgactctatattatccggctatccgccatctgctttatccggccgcctgatatctactttaaatttgagttggatgccttgattgccttcagttcatcaaagaccacgtcattcaggaccttgatataggttcccttcatgcctgaggagcgggattcaatgacaccggcgctctcaaacttgcggagggcattgacaatcacggaacgggtaatgcccacgcggtcggcaatcttactggctaccaggatgccttcgtttccatccagttcctcgaatatatggatgatggcctccagttcggagaaggataaggtactgatggctgattttacaatctgcaccttcctggtttcctctgcattctcctcattgacagaacgcatcatctccaggcccaccacggtggttccgtattcgctcagtatgatatcgtcaatatcatactgggaatctgacttataaatgaaaagtgttcccagtctctctcccgctatatcaatgggagtaatgatggcctgatacttttttacattctcctcagcaaagccaagggttgcaagattcacgttctcttttgtggacaaaacgcttaaaagacgttcattcagcatcttatccacgtatcctccgacctggtcttcgataagttcctctatctcatctaccccagaacagatactcacccccagaaccttgcccttcttgctgattaccaggatattggataacaatatctcacttaaaactttacagatgtcattgaaaacaactttatgagaattattgttatgcaatagcttgttgatttttcttgttttgtccaacaattgaacactcatctccgaaagcctccttatccaaattgtatatcacccaaaaatactctactaatactagaattttagcacaatttttaagcaataacaagagttttttgaagttttcgattattttaagattttgatatttttccttttttgttttgacaaatttttctatttttcagtcttatccatgcggtacccgcaggtctcgccggcacacaaaagcttatttcctttctccaccatataagatccgcagaccgggcatttctgggtggaaggcttctgccaggacatgaagtcgcagtcaggactggcctcgcatccatagtagagacgtcccttctttgtcttcctgcgcaccagctccttaccgcacttcggacatggaatcccgattttttcaaggtaaggcttggtgttcttacactccggaaatcccgggcatgccaggaacttgccgtgaggaccgtacttaatcaccatctggcgtccgcacaggtcgcagaccacatccgacacctcatccgcaatctttacggattccagctccttctcagctgtcttaacagcctcatccagatcaggatagaagttgctgacaacggttttccaggcaacggtaccgtccgccactttatccagcagggattccatattggctgtaaagttagggtctacgatgcttggaaaggaattcttcatgatgcggtttaccacatcccccagttcagtcacatagagattcttgttctcctttaccacatatcttctggcaatgatggtggttatggtgggtgcataggtactcggacgtcctatgccctgctcctccagagcctttaccagggatgcctccgtataatgggccggaggctgggtgaaatgctggcttgggtccagctgctccagcttaaggatggcccccttttccaggttgccaaggacctgatttttctcttcctcatcgtccgcttccacataaacagacataaagccttcaaaatccagcttggaggccgatgtggtgaacaggtggctgcccgccccaatctttacagaggtggtctcatatacggccggcgccatacggctggctgtaaaccgcttccagattaactggtataaccggaacaggtctctttgcagggattcctttacaatggtcggagtcaatgttatgtcagtgggacggatggcctcgtgcgcgtcctgtatcttagcgccctcttttttagcctggcttccctgagcaacatatttctcgccgtaatgttcctttacaaatgccctggccgctgtgtccgcctcgtctgcgattctggtggaatccgtacgcaggtaggtgataagccccagggttcccttgccttttacctccacgccttcatagagctgctgggccagacgcatggttttttgtgtggaaaagttaagcgccttggaggcttcctgctgcagagtactggttgtaaacgggatgggcgccttctttacccgctcccctctctttacttcctccacctcatatctgcatccctctaactggctcagtatctgatccagctcttctttgttgcggataactgtcttaccgcccttggaatccctggtcccataatattttgccgccaaaggcttcttatttcctttcaggagaaggtctgcctccagattccagtattcctcaggaatgaatgcattgatttcgtcctcgcggtcgcaaatcatccgcagagcaacggactgtacacggcctgcactcaatcctctcttgacctttgcccacaaaagcggactaatccggtaacccaccattcgatccagcatccttctggtctgctgggcattcaccaggttcatgtcaagctccctgggagtcttgaaggatgcctttaccgcgttcttcgtaatttcattgaaactgatgcggtaaacatccttactcttaagctcatccagcttaagagccttcatcagatgccatgaaatggcctctccctcgcggtcagggtccgttgcaagatagatcttgtctgccttcttcacttccttgcgcagcttagccagaacgtctccctttcctctgattgtaatgtacttgggctcatagtcatgctccgcatcaaatcccaactggctctttggaagatccctgacatggcctcccgatgcatctacctcatagttggcgcccagaaacttcttgatggttttcacttttgctggtgactctacaattaccagataattcgccattgtaaaactccttactcgctgttcatttattttcacaaaatggagacacacaccggcgaatgccggaggatatccaaaatcctgacacttatgtgattgttttcatgtagttctgtcctgatgttctcaccgcaagtccttccaattccagctccagaagggcgctcatacagcggcctgccgaaagtcctgtctgtaccataatctggtccggatgtctgggttcggaatctaggcaactatacaccattttttcaatcttggcaagtcccttctggtctttttcacggttaatacactttttttcgtgaaaaatgcccatatactccagcacatcctcagggctggtcaatatccccgcgcctgactgtatgagctcattgcaccctgcgctcagggtatccgtaatccggcccggcagtgcaaatatctcctttccctgctccagtcccaggctgacggttataagggaaccacttttctttcgggcctctattatcaaaatcacgtcggaaaggccgcttatgatacggttgcgcataggaaaattcctggccaaaggttcctcacccggcccaaactcggagataattcctccctgagatggaattgcctcatacagataataattgcttctgggataacatatgtttaccccgcacccaaggaccccatatgtcttcccctttcctttaagggctccctcatgcccggccccgtctatgccgagagccaggccgctgacaatctgcacgcctgcctttgccagctcctttcccataaatccggctgcctgcctcccatactccgtacagttcctggcccctatgatggccgcggtgggacattcctcatccggcagctctccctttacataaagtcccattggatagtcataaatatgcagaagccgtttcggatattccctgtcaaggggcgttacgaaacggattcccttctcctgtagatggtcatattcccggaccatacaggaaaactgttccttccaccggtcatacgtacggcatttttcctcgctttgcaaaattccctgtttctttaattccattccttctatataatatgcattctcaaagcttcccgccgtctcccatatgcgccgtatggtcactgccccaaagcccggaatacgggtgagccagtagagatattttttttcaagtttttggacccgggccatccccgggccggaatcagcgttccggtttgaatcctgttccatactattttctatccccatatcttttcctccagtcccccgtatcccaatgcctctgccagatgttccttttttatatccttgctgtcctccaggtcggcaatggtcctggcaaccttcagcgccttatggtaccttctggcactgaagcctcctgattcataaatccgttgggcaaaggccttctcctcaggtcccaggcagcaatgccgttctacctctttcatgcccatgcggctgttaaaacgtatcctggttcccgaaaaccggcgttcctgacgcgttctggcatgctccacccgtttccgaatggatgccgaatcctcgttttctccctgagccaggttcaattccccaaaggtcaccggagccgcctgcgcacagatatcaaaccgttccagtatgggcctggatatatgccccagatatcgtctgatctgattttccgtacaattacagcgattcctgtccggataaaacccgcatggacacaggttcatggctgctaccatcataaaatctgccggaaattcataattaccagatacccttgtaactgtgattttccgttcctccaaaggctgcctcagtatttccaccgctgagcggccaaaatggggcagctcgtccaaaaaaagtacgcctcccgaagccagggacagttctccgggcctgggaggaacacctccgcctgccagcgccctggctgttatggtgtggtgaggactcctgaaaggccgctcagacagaaggggacggcctggtggcaggagtccgcagatgctgtagattctggatatctctatatcctcctcccgcgtcagcccaggcaggatggtggggattcttctggcaatcatgctcttgccggttccggcgctgccggtcaaaagcagtccgtgcatgccggctgccgccacctccgctgcccttctcaatatggcctggccgttgacctccctgtaatccaggccatctttcttctgacggcggtactccgggcggtgaggcgggacatggcacggttccatggaaacagcgcccttaagaatacctgccatatggcccagagatttcacccccaccatgtctaccccctccatcaccaggccctcctccacattttccaatggcaggaaacatctcctgatacctttctccctggccatggctgccagggaaagcacaccgcttacaggtttcaccctgccgtccagtcccagctctccaattaccatgctgtcctccagcacatccgtccccaccatctgaaacgcgcccaatatggcgaccgcaatgggaagatcataggctgtgccgccctttcgtatgcctgcaggagacaggtttacagttatctttttagccgggagacgaaatcccgaatttttaagggctgtcctgacccgttcctgggactcccttacctctgaagccagctgtcctgatatggaaaatcccggaagtccgtcggacacatccgcctccaccgaaaccagaactccctccacagcccatataccgccgctgttgattcgcgtaaacatccatccgcccctttctctttgttatcgtagccatactatactttcatgaatcagtggaactttggcacgataccgtaccggatttaaatataagacaggataggaagaatcctatccacttgaatgaaagatataattactatactaaagggaacaaaaaattacaaggggcaatctaaactgttttctatgaatgtattccggtgttttccattcgtgtttttcatacgcgttttccatacatgttttccatacatattttccataacatgtctcctgcgggaccactgcgccttctgccccatctatttttgaaactccgtcatataaggccggaaacgcaggggcagatgggttctctggcataccgggttatggcgttcccttatggcaatggtatcgcagaacatacgccacatgtcctcataagtctcctcgtctgtccgctccttcagccagtggctccacccctggtcgctgttttcctgttccggttcaagagggtgatttacaagaaaccaggagcgtccggcgggatggactgctgcccttttatggttctcatcataaatgacccagttttcctccggcagccggtctgcaaagtgaggtgccaatagagtcatgatatcgttcttcggaccgatacgtgacaccagtatgcctcccggagtctctgaaaagcgcagaaactctgtcagcagatgattttcattgtaaacattccggcacagcccgaatatgtcatagcaggccggaagctgaagcatgtccagcaccgacgggccatgtctgaaggcctgtatcaggaacctgtatatcttatctgcccgatcccgatcctggctcagggaggcggtgtacaccttcctgtatatctcctgagagagtttagcgcacacagaacggatgaccttctccgctttctccgggcagctctgtacctccctgtactccgcaaaaagctccaattcctcatactcccccttgacggccagccggacattcccatggccggccggttcagaccatgcatcgtatacgccgcagagaatcccctcaagccatggctcgcacatgtaaactgtcatatcgtccacctcctcaatccttacaggcttcctgtcacagaagcataatggtcttcgcttgtcaccggcatctccagatgcatgtcatcaaagagagtgagctggcggaagctgtctctgttctcaatatcccaggctttgcgcctctcatctcccacaagacaggatgtaatataatcctggtccagcctggtgccttccatcatgcgtcctttgcaggtgatgaaatatctggcccgcttcaggaccacccccatcttctttaagtcctcgaacaggagtttgccctgctttctggcattcacaattctctgggccgactttacccccatgccggggaccctgagaagttccccgtaggaagccctgttgatttccaccgggaacagctccaggtggcgcagggcccagtcgcacttggggtccaggaatacattgaaattcggctgttcctccgacagcagctcctcagccttaaatccatagaaccggagcagccagtccgcctgatataacctgtgttcccttaacagaggaggtctggctgtcacggaaggcagacagctgtcgtcgttgaccggcacataggcagaataaaagaccctcttaaggccgtaattctcatacaaggcctgtgtgacagccatcatctggtaatcgttctccggtgtggcccccacaatcatctgggtactttggcccgcaggcacaaagggcgtcctggcataccgggagtcggaaaggtgccttctttctctcccggccctctccatggacttctgtccatcacccggaccatcctgaccgctgccggataaaccatggtttcccagcaaaagagcgtctggctgtgccagctccggacgaatcagggcagcaccgcctgcaaaaccagcccgctccgcggcataggtcttcttaaattccctgtcatatcccagaagatggctggacaccgcaatgccctgctgtacctgacgcatgggctttaatatcttatctctggtcttcccgggagccagattcttaagtccctcggccgtgggaagctccagattgatgctcatgcggtcagctaaaaaacccatccgctccaccagctcaggggcagcccccggtatggtcttcacatggatgtatccgttaaaatgccactggttcctgagtttatgcagggtctcgtaaatcagctccatggtatgattggcgttatacaaaatacccgagctcagaaacagcccctcgatgtaattcctgcggtaaaattcaatggtgagcttacacacctcatccggcgtaaaggcagtcctcaccacatcattggaacagcggttcacgcaatatttgcaatcgtagatacactggttggtaaacagaatcttgagaagggaaatacatctgccgtccgctgaaaaactgtggcagattccggcttccgatgtgtttcctatactgcctgcctttccctttctccttaccccgctggatgtgcaggccacgtcatacttggctgcatccgtaagtatctttaacttttcctgtacgcttaaattctcctgtatcaacatgatatcaccatccggaacgtatgtttgtcctgatagtatagcacagaattcaggcaaatgcaattgcaaaaagaacatttgttctttttgctcgccagcaaatttttagggatgctattatcaatgattcaactattttcaggctgttattttaagtccagtattcgcaaacaattattttcagacatccctatggatgaaacccaattacaaagaggcctgcgcctatccccgccatatcatatgacgcgaatccggccgcaggcctctcaattatcggaaaaatcaatgaaacatcattctgtccggaatttagatttatctttaatccctgtacccgttgggattcatggactgccatttccaggaatcagcgcacatctcctcgattcccttctcagccacccagcccagctcacgctttgccttggctgaatcggaatagcaggtagccacatcgccttcacggcggggctgaatctcgtatttcagcgtcctgccgcaggccttctcatatgcatggagcacatccagcacgctgtagcccacgccggttcccaggttatagatgctgacgccctctttatcctgcagcttctgcactgcctttacatggccctttgccaggtccaccacatggatgtaatccctgaccccggtaccgtccggcgtgtcataatcatcgccaaatacattcagatggtccagttttcccactgccacctgggcaatatagggtaccaggttgttggggattcccttgggatcctctccaatcagtccgctctcatgggcgccgatgggattgaaatagcgcagcagcaccacgttccactccggatccgccgtatgtaaatccgtcagaatctgctccagcatgcccttggtccgtccgtaaggattggtaatctctcccttggggcagttctcagtgatgggaatttctgccggatctccgtacacggtagcggaagaactgaatacaatatttttgaccccatggctgcgcatctcaccgcagagaatcagggtgcccgtgatattattgtgataatactccagaggcttgcgcacggattcccccactgccttaagacctgcaaaatggatgaccgaatcaatttcctccttgtcaaacacttctttaagggccggctggtccagaaggtctgtctcgtagaactttaccttcctgcctgttatcttctctactctctccagtgccttctcgctggagttataaaggttgtctactacaaccacatcataacccgctgtcagcagttccacacaggtatggcttccgatatagccggcgccaccagtcactaaaatagccatgatatctcctccttacgaacaattgattgctgcaaaaaggcggaacaggttaagctgtctgactgttccgcctgttataactagtataaagggaaagctgcaataaaacaatgcacaattcttctatctttttacaatattttttgaatggcaccccttaaccgtgttttgcaaactctgtccgtatcttctcaattgcctttttctcaatccggctcacataagaacgggagatgcccagcttgccggcaatctcccgctgggtatgctccttcccacggtacagcccgtagcgcatccccagaaccgtcttctctgtctctgtcagacaggactcaaaggcctcataaagctcctttacatcctgtttgaaaatcatggtatccagcgtctctttattgtccatctctatcacatccaccagactgacagtctccccgtccttgtctattccgatgggctcaaaaagggacacttccttggaatacttcctgcttgcccgcagaagcatcagtatctcattttccacgcatctggctgcataggtggccagtcgtgagcctttatctgcgttaaatgtattcactgccttaataaggcctatggttcccacggacagcaggtcctccatgtcgtaatcagagccctgatacttttttaccacatgggctaccagacgcatattatgctcaatcagcatatctctggcagactggtcgccctctttgcagcgttccagatactctttttcctctcctgctgataatggtttcggaaaagtcttcaaagaaagccaccctgcatattcttaatcttattctatgcgggggcagcttgccaagtgcttttacaagtttttattggcttatactattttccgaatctatgacgaacaactccttaaacttcttccggtccaggctgtggttgtacacaagggcctcataatccagtaccgtgtcctgataggggcaacgctccgactctgccttggcccagtaatagtaggttccctccctgtcataacagcccaggaaatggaccaccggaaggtcctccttcatggcaagcaggaaccgattatagggcgtcatttcaagattggccctccacaggacctctgaggacaggtaaacagccccgagacgccccatatcctcggagggcatgctgtagttggtccatataataaatggggtctcgtaccacatgagatgttcctgcaccgtgatctcagaactaggcatgtcggctatgtcatcgtaaaattcatcctccacgctgggctggtgatccccgaacatgacaatcatggtaggctcgtctatccggctgaaatactccaccagatactggaatgcctggtccgaccgcttcataagggacaggtactggtccgtctttggatattttccctcgtactctccggtaagccacacctcctgttcaaaattgtcataggtcccctcatatccgccgtggttctgcatggttacattgaagataaacagcttatcctcaggattttccttggcttccaccacctggatcagcttctggtaatccgcctcatcgcttacatagttgcgaagttcctcgctgccctcgtaaaattcctggtccaggaacgcatcaaatcccatattctgatagcattccacccggttccagttttctccgggataagggtgcattgccacgctgtaatatccctggtccttcagggtactgaccatggaataggtatctggttttacattgaactggtaggcaatggaattggcaggcagcagggccatggagtccccggtaagaaactcaaactctgtgttgctcgtcatggaaccgaacacgggcacacaaaggctgcccctgaccgtgttttcctcaaggctgtccataaaggggaaatattctgtattggtggtaaaatcgcctgccgtcttaagctctgccaggctctcgttcataatgcatattagattgaccggcgttacaggctgcccctcctccggccggttctccggattctccggattctccgggctctccggataggcctggctttttaccggataagcctgaccatttcccgcttccgcatatatactctcctccaggcggttatatatctccttaagcctggcgttactgtacccctgaggcggcttctttaccacatactgcagggagaccgcggtggacagcacataaccgtattcctggtatgtcccgttgatggcccacatgttgatgccaagcccccaggaagggaccagaacggcgaagaaccaggccccgtaacccgctatggacgcagcgatgccgcctcccaccgcaaggcggagcttccagcctctgacccggcgcggtgtgaaccacaggaatacgttcataagcaacagcaggacaaaggctgtcttcatctggcgggtgataaaaaattcatagttgccggacacggtcatggctgtcctgaatgccatcacatcccacagcataatggggcggctccggaaggccaccacaaaggtctcagccagggaaatgacatagaggacgcaggagacagcgggcacggcgattctggtcctccccgtgacggcaaacaaagccagatacagcacataaatccagcctatgttcaggaccgccatataataaggaaccgtgtccaggttccccgtgacatactcaaacataaagtatgacaccactggggccattagcagactcacggttcccactatataccatatatattttataatctttatcttattttcttttgtcaccattgccgccttttgttagagctttgttaataatttttaataaacttatcctagcataaaggatttgatgattcaagagtcaaatacttccatgaaagacatttcgcaaaaccttcacatgttccatgcccacatctcagccagggggcgcagatcccatcactgtccaggccgcttttatccttcctgtccattcatgatatatttgaccccgggcacgatgatatgggtctggacctgtgtaatgcgggcgccttctatcagggaaacataaagtacataataggaatccttgtggtaatacagccaatgaaccactgtctctgctgaatggttctaaccgcaacttttccccatcagatacgtatacgatatttccccgtgacaatcctcctgtaaaatatcatagtcagcagggcagccgcaatccatccaaagggccaggccatccagatacccgtgcttgcgaaatgccgcgtaaggatattggccacgataatccggagaattaaatccggcacagtggccatcacgaaataggtcatggcaccggagccccggatgatgccgtctgtcatgagcttaatggaaatcatgaaatacatggggcttacaatgcgcaggaactccatgccggactgtatggcccgggtgcttcccgcccccaggaacagtcccatcatctggcggctgaacacaaaatacagcaggaaaaacggaaccgcggcataaaaggacagtctgacacctgtcttaaagcccaggggaatccgctctttctttcccgctcccagattctgggccgtataactggacagacagcctcccagggacatgaatgcattgatggcaaaggtattgagtttgatggcgccggaataacccgcaatgacagcggatccataccggttcacgatttcctggacaaacatatttcccacagacaatacgctctgctgcataatgccgggcactgcgatggctgctatctgccccagcaacgcggcgctgaacagcactgtcttccggtcggtcttaagggcgcccagacgcctggccagggtacccagagccaggatggcggaacccccctgggcaataaaggtagcccatgccactccggccacccccagtcccagccgggccacgaaccagtaatccagcgctatatttcccagggatgagccgataaggaaataaaggggcgttctggaatcccccagggccgtgaatatgcctgtacatacattgtagaggaacaggaatatcagcccgtacacatagatcttaaggtacagctctccgtccgcgaatatgttgtccggggtatggattacccgcatcatatccccgcaaaaggcatatcccagaacggtcagaatcaggctcatggcgccgcaggcaatgaatgccgtgtggacagccgtcttcatcctgcctatgtcctttgccccaaagagcctggacaccaccacggaagctcccaggttgcttcccacagcaaaggccataaatatcaccgtaatgggataggaggcccccacggctgccagcgcgtcctcccctgcaaaccggcccgcaatgctgctgtccgcaatattgtaaaactgctggaacatgacgcttatgaacatgggcagcgcaaaccgccacagtgtttttttcggatgctccaccgttaaatctgtaatcatgataccctttttcctcccaatgacaatttatgtaccattatacccttggtctgccattagggcaaccggaaatacagagggaacgcggagcaaaacactaacaaaatgctgcaaatcagcgcaaaaaagcgcccatggcattcccttttatggaatttgccgcaggcgctgtctgtttactttattaaactttgcataaaaccattagtggtggaacagacggattcccgtaaatgccatcaccattccgtactggttgcaggtctcgatgacctggtcgtcgcggacagaacctccgggctgcgccacgtatttcacgccgctcttgctggccctgtcaatattgtcaccaaatgggaagaaggcgtcggagcccagggccacgtctgtcatggtgtccagccaggccctcttttcctcagcggtgaatacaggaggctttaccttgaaggtcttttcccatcttccgtcagccagtacatccatgtaatcatctcccatatagacatcaatggcattgtccctgtcagccctcttgatgctgtccacaaaaggaaggttcattacctggggagcctggcgcagataccagttgtccgccttgctgcctgccaggcgcgtacagtgtaccctggactgctgtcccgcgccgatgccgatggcctgtccgccttttacatagcatacggagttggactgcgtgtatttcagggtgatgagggaaatcatcaggtcaatcttggcagaatccggaagatccctgttctcagtgacaatgtcctccagaaggtccctgttgatctccaggttgttatgtccctgctcaaaggtgatgccgaatacctgcttgcgctccagggcctccggctcataatccggatcgatctggatgacattgtagttaccgtttttcttggacttaaggatttccagggcttccggctcatatcccggggcgataacgccgtcagacacctcccgcttaatgattctggccgtgtccgcgtcgcacacatcggacagagagataaagtccccgaaggaggacatgcggtctgctccccttgcccttgcataggcgctggccagaggtgagagttcgcccatgtcgtccacccagtaaatcttcctcagcgtatcgtcaagaggcaggcccacggctgccccggcaggggatacatgcttgaaagaggcggctgccggaagtcctgtggctgtcttcagctcttttaccagctgccagccgtttaacgcgtccatgaaattgatatagccgggtctgccgctcagtactgtgatgggaagctccctgtccccttccatgaatattctggaaggcttctgatttgggttacagccgtatttaagtgccagttctttcataatgttacctcgctccctatttgtttttatttacgattctcgtctcatatgtgccggcggcaatatcgatataacgcacgaacagggacaccttgttgtcctcgttaaggctgttccagaccaaatccgtaaaggcatcgatgtccccgcttatgcccaccttcttaggctctccctcaaagctgggaagtggattgccgtcacgcatgtaggtgtggatgaaacgtccctctcccgctgccggtgactgataggcataggtaaagcgcaggcaggaatccggatttgtgttgtcgctctttaaaatggacatggcatagttgtaattgccgttttcaatatgcaagatgccggagatccgcggtgtgtagttaggcgcgtctggctcgaattccctgcatcgtaaggactgctcaaaggtcatctggtgatccatcccgtcgtagatggtgtctgtctggtccccgttggtcacaatagtcttgtttccaagaacccgtacaggggcatatataatcaggcttgggtcctctaacttggcggggtcaaatgcctgggtacggatcccttccccatccgccacaaacacgcggttgcggctgttggcgcttctgcccatgataaaataggcggttactgcctttgttccatcatcagagcgcccgatgacgattccccgtccgggataagcattgcttttcagttcctgttccagtgacatctgattcatactgattcctccattcggcttaataggtttctgaaacttaaaagagccggctcccggacacgcaaaaaatatgcatgcccaggcggtcggctcaaactagttcatggtactgcgtgctccctgtggttgctccactatccgccagtcacacgccctaccattaatatatatctttttttctaatattgcaacccttttttagaagttttactaatcaagagtgttcaggaaagctgtctccaataccggcatattttccctattcatttcggatggctgccagggggctcagcttcatagcgcgcatggccggcatgaatccggctgccatgcccacaaagatggcaaagaccacggctgccacggaaagccagggcggtattctggacaggttgcctgtcaggccattcatttcctccaggtttacaaaccggttgataaccaccgagatactgtaactgagaagaattccggcgacacctcccatgaagccgataaaaccggattcaatgagaaacatgttgcggatatttcccatatcgcagcccagtaccttcatgactccgatttcctttgtcctctcataaatggacatcatcatggtgttggcgatgccgatggctgccacgaacagtgaaacggctccgatgccgccgaggacagcctgtatcatgctggactgctgtttcgtgctctccatccagtccgcctggctgctgacctggaatcccatgtccgctatctgcttctgcaccgcctggacatattccatatcgtccacaaatatctgcgcccggttataggtcagatagttaaggggctttccttttttattggtgggctgccccggtatgacggttccctttttaaacaccttgcgcagctgggctttcaggccgtctatatccgtgtacacattataggaataggaattccagtcgtccggaccgccctccaccattccggttgcattcagcatatactttttcggcggtttcaccggggtctggccgtcctccgaggaaccgacggaaccatttctggtctggaaataagcatccacgtcaaaaatcacaaaaagaggcttattcataaagtccacatccggcatctcgcctgtgtcccagtacccgcggcctgtcttggaattataaaaattctgctggaccgtattgcccaccaccatgcccatctctcccggctccggcagcctgccttcgcccaggggaatctgctccagaaaggactggcttacgcccataagggacagatactgggcctcgtaggctccctggcgcatgagcacattgatttccaggaccggggataccccggtcacatggggcagacggccaaactgtgctatgacatcgtctgtgatgtaggtgggatccgaggatttgctgctcccgccccctccagccatcaccgcgccgccataggatgagccggaatacacgttgatggtggtcaggcttccccaggaggaaatctgttccatgaacatctggtccagtccgattcccagggataccatgaccacaatggacgccgtaccgatgataactcccagcacggtcagtaccgttctcagcttcctgcgtcttaagttgttaatgctcatgattacgagatcaggaaatctcattgtccacatcctcttcccttgccgccttgcgtttcttcctgattcggatgacaaccgcggcagcaataccggccgctgccaccacaccggcaatcaccaggaacttatatttactccagaaggacggcgctgcctcggcgtccatgctgcctgcatccatggccgctcccgtatcatcccagttctgttccatctcctccatgaccatgagggtcagctccttttccaccggttcggcgggaacgccgttttcatcctcgtaatcaatgcggatgcgcaccgttccctcatccagggtgggggccacgcctgtcagcatggtgtccacgttgcccgtttcacccggcttgatgtttcccacataggcgtccgtggtcttgatggaatccgcctcaaaggtcacggtcacgttgtagaggatgacctttcccgtgttgttgatgccaaacatgacattggactcagatcccacggttaagctgtccggcataacgtcaatggtgctggtgcttaaccgggcatactgctttacagggatgtccactacaatgctttcctccgcgttcttgaattcggggctgtcgtacttctcctttaccgtgatggcgtaggagcgctggtccactcctgccctggccgtgaatctggccctgacctcggtggtctgtccgggagccatattgtccactaccagggaggaggtgcctgactccgtggtaaacacggcgctgtccgataccttctccgactccaggttaaagagaatgttgctggcaggaaccgaggtggatgcgttcttcatgttaagaatcagctcaaactcgtcccctgcgtagattttctccgggaccgtgtgatagctctccacaatcagcctggccctggtcctgtcgttggcgttaaaatcacccaggtcgtcctctttatccttggacacgatatgtacgtaaaaggttccctcctccgtgtgcagatctccctcagagcttaagcggaaggtgatggtgtatttgattggataataacccgtgtaggaatccttgcggattgccatgctgtagggagccgatacggtttctcccggctgcacgcgctcaaaggtgcggtcatagttgccgtcgttgatttcaaaggggaatttggcatcgtcctctgagagctgcatgctgaccgtcacatcctgggccgtggtctccctcttgttgcggaagtttacggtgtaatccatgacattgggatagactcccctgggcgtgggctggttctcacccaccacaaagtaattgccttcctttttgtcctcctcctcgtccgctccggatgtggatgaggtggaaatccatacgttgatataatctgtatcggaaccgccgtcccattccagcagcacaggaatgctgtagtatccctgaagggcgtcccgccgcaccctggctgacagggacacgctctttacattgcccttcttgatggttcccacgctcttggccacaaaggtggtctccatgatttcaaagggatagtagtcaacggagtaatccccgtttcccctctcctctatctgctggaactcattggtctgcaggagactgatgcgcaggttctccatatcctcatccgtggccctgatacggaagggaatggacatggattttcctatggtccctttgggtgattttgtagtaaatacataatcattttcactggcattggtgttatagcccaatttgtaatcgctggccgccgcactggacgaatgcatcccggccagcatacaggctgccaggaacgccgtcaggcctttgcaccatttatttgctctcattctcattgcactcctttttctctgcattcccctcatataacgcttctctgccgcctgtctcgattcccacaatccggccgtccatgattcggattctccggtccgcataggaggccagattgttgtcgtgggtaaccatgaccagggtctggttctgctccctgacaatcttctgcatcaggcgcagcacctccatggtggtcttggaatccaggtttcccgtgggctcatcggcaaatataatctggggatttaccaccagggccctggcaattcccacacgctgctgctgtccgccggacatctggttgggcatatgcctggcctggcctcccacgcctaccaaatccatatatttcctggcctccttaagccgctgtcttctggaaacaccacgaaaggaaaggggaagggctacgttctccagggcattcatggtatttaacaggttgtatgcctggaagataaaccccaccttttcgcggcggaagctcaccagctggcgctccgtcatcttctctatatggaccctgccaatctcaatctcccctttggtgggcttttccaatccggccagcatgttgagaagggtggatttgccggaaccggaggcccccacgatggcaacgaattctcccttatatatgtcaaaatccagtccgtccagggcccggaccttgatatcgcctacccggtatatcttatataaattctttacccgtatgaccacgggcctgttttcttttccagtattttcttttcctgtgtctttttctcctgcatcctgtttctcagggaccgacgacacggtcaactgttcctgtgccaaatccagcctcctttccggggcgtaaaagcgctccaatccggataacagcctctatggacagactgttactgattttgttcagtatagcacagagaaggtgatttgttcttctgtttttctttaatcttcctttaataattccttacaccctatccgttttcagtagcaaatgtaacacgaaaacaggtaattgtaaagtaaatcaggccggagcgcagcaaaagaccgggccccgctggttttaagcggggcgcggttttgaggggttcttaatatttcacagtacggttcaggagcagcgttcataggacagcagatagccgtttttcttcagccatttcatgtcttggaatgggtaaacggtcctccggttgcatcgtaaaacggctctttccggggtaccggcgcaagattgataataaatgcgtctgtgaatttaagtaattcgccatcgtgcttcattttcgtctattcccatccttttggaagatatttaagcgtattcttgatcatgtcatccaccagaagcctgacatcttcttcccggcagttctttccctttacaaggggatcgttcataaatgccctgaccaccttttctttatccggattaagggctgcttccataatcagctcatggttctccagatggggcatcagaagttcctttacattttccggcactgctcccgcaaccaccggatagatgtgatccttttcaaagaccgcgttggtctccaccagggcacccgcgggcaggttggtaatctggcaggccgtattagggatattcacattgctgacaacccttgtcaggccgcagagcgctttgattaaaaggattccctcctcgccggtaggttccagcttgacttcttcctcaccggatgccagcctgcggctcctatccagtctctccttcaggtcattctttctccactgcaccgtggtcaggccgaatttccaggatgccactgtctccgggtcattcaggtactcatttccgggcatgaattcagccagatgcctgtcccctgccgccgcaatcaggccgtacctcttaaacagatccatcttgacccggttggcgcacttaaaggaggaattcatccagtttccgccttccacttcatatccctggtcaaaatgcctgtcaatatactccctgtaaacagggaacaaatcgatccccttataggaagcgcttgaaaaccatgtgaaatggttgatgcccagcacatttacatggatgtcatgccagtcaatatctgtttccccgctgctctcctcgcagattcccttaaggaccttctgggtgccaaagacttcatggcagcacccgaatgccttgatttccggaaatacatgatacaatgtctttacacacagtgacatggggttggtataattaatgacccatgcctttggcgcatattcttttatggccccggcaatctccacgaacatgggtatggtgcgcagggcgcggaccattccgcccggccctgccgtatcgcctacagactggtagattcccaggcgctccggaaggtgaacatcagactccatctcgtcaaaggtgccgggcaggatggaaatgacaacgaaatcacagcctgtcagggcgtccttaaggcttgcgctggtctcaaacttccagtctcctttggcgtcgtccctctgcatcagacggttgccaatcacctcattgttctttgccgcgccgccgtcaatatcatacagacgtatggtaccgctgatctggtcctccagggcaaggtctgtcataaaggtccaggcccatcccctggaaccgccgcctatatatgcaatctgaatatccttaactttattatcgctatacttcatagcttcctccttaatatgtttacttgaaatatacatgctctgcattcctgtacatgattcgttccttttcttcccgggaaaatgcatcgctgcatgtgatgtactgtataaaatgctgatagctgtcctccttcagcaccgagggtatatccgttccgaaaatgagtttgtccgcccctgctatctcaataccatgcctcagatacctcaccgcattgggataggggtaggcgtcagggccgcagttatggggcagggcagccaaatcaaaccacacattgggcagggccagcttctttaatccttccacaagcttatcctcgtccctcatggacacggccagcagatggcagaccacaaacttcatgccgggatgctcctttatcacattcaaaagccggtccgtctgccagctctcactgccgcatttgcctatatcaatgacaaacaccagaccatgttcatccgcataatcatattcggccttcatgatatccccgtccaggggcagcgtgaaatggttggccatgagcccagagccggtacttacctcaaacttcacaattggaaaacccagctctttaaacaggtgttttcgtatctgttccttgcccctgcaaaaagggtcgtaggaagccgcggcacaaaaccggtccggatattttttcactgcctccatggaatagagattctggaaaccaaagtaatttccctggagcagcactgctttctccactccgttatcatccattttcctgagaatatccccggcagtcaccactccctggctgaattcatccggaagcattcggaaccgttcccctgatgcatattccgccatgccgtttccggcaaagcgcagctctcctcctgcccctgttccggcgatacactgtaccagatggacatgtccgtctattatcttcatctcatgttccattttcatcatcctttcaggccggaggtgctgatgccctcaaccagatatttctggaagaacaggaatataaggatggacggcagtatggacaaggttgccatggcgaacatggcgccgtaatccgatgacgagcccgggtcgcaaaaaagcttaagcgcaaggctgacagggtacatgctggacttgctgacatacagcagggctgaaaggaaatcatcccatctccacatgaaggagaatatgcaggccgtgaccagtgccggctttataagaggcagcatgatgcgggtaaaaatacctgcataggaacatccgtcaatcttggccgcttcatccaactccgtaggaataccgctgatgaagttggaaatcaggtacacaaaaaatccctgtatggcaaagaaatatggaacagtcaacggcatataggagcccacccagcccagcttctgataccacagatactgggggatcatgagtacctgggcgggaagcatcatggagagcagcatgacagcaaacaggatgctcttgcctctgaatttgaatctagcaaatccgtaggccaccagggcggaggagaccacggttcccagggtggccaccactgagatgaagatggagtttttgaagaaggtggcaaaggaaatctttccaaagcccttccatcccgtggaataattgctgactataaatttctccggaatcaggctgcccgctgtggagaatatggtgctgttctccttaaaagaactcatgaccatccatataaggggataaatcatgatgatgccgatgacgaaaacaatgatatggtatactgcttttttaaccactcgcttctctttcatgattaaagccctccttcatatacccagaaccgtttcgttgcaaacaggaacagggttatcagaccaatcacagccagcatgacccatgcaagggccgcaccatatcctgtgttgtagaattcaaaggactgcttatacatgtaaacagtatagagcagggttgaattcatgggttttccctgggtgatgatatagcactgggtaaaggccagaaagccgttaatcatctgcatgaccaggttgaaaaatatggtgggggtcagcaggggcagggtaatcttaaagaattttgccggcgcgctggcgccgtccacctctgccgcctcgtacagggactgcggaacctgttttaaggatgagaggaagataagcatggatgaaccaaactgccagaccaccagcaatatgaggacccatatagctgttctggtatctcccagccacgaaaagctggtctggattcccaccattcccagaagcttattcaccacgccgtccatggcaaacatcctcttccataagatggatactgccacggaacctccgataatggagggaagataataggctgccctgtagaaaccggacattttggaattttccagcaagagcatggccacaatcaaagcaaacagaagtttgagcggaacagacacaaatgcaaagaaaaaagttaccttcagtgttttaaaaaacgtttcatcctggaacatggaaataaaattcttaagtcctgtaaaaacaggcggtgaaagaatgtcataatcacagaacgaataatacaatgaaattcccattggaacaatcatgaacagcaggaatccaatggtaaatggcagtgtaaacaggacaccggccacactttccttgctgagctgctgctttaatgccttcatagcctctcctcctcgccttatgaaaagagcgacctacaacagccgctcttttttaatttgctaatttttcttggactccataatctttgagccttctgtaaacagctgctgaccggcatcctcagccgtcatctgaccgtaacatacctgttcctccagcttattcagaagatcgtttacctcgcttgaaccgtcggcagcaggcggattgatctgggaagaattgtcagatacaacttcgttgatgaacttaatcacttcctggctggtctcatccatcttaggcgcaatggaatctgccactgctgatgacagaggaatgcctctctctcccagaaggatttcattacattccactgagtttgtgatgaaattcaggacctttgccgcctcttccggatttgtgctgtcctttgtgatggcgaaaaactggcttggcttcagataatcggacttgacagggtctgctgaaggccaggtggttatggcaatctccacaccctcaggtgcggcgcttcggatggctgtgagctggttggtatagttaaacgcacaccatgacatggtttcaggattggaaccatacaccattgggtcctgctccacggatccgatggtcctctctgcaaagatggaaggatccacaacccatccgtcccttatgccatcctcatagagtttaaaataggatacataatcctctgctgttccgcccagttttccgtcctcgaacatgactacatcattggcgcgcaggaaatactcgatgaaattctcaccattgttatatgcaatgttggtcttatatcctgtcttttccctgatttccttgcagagtgcaatgaactcgtccatggtcatattatcttttaccgtgatgcctgcctcatccagggctgtcttgttgtacagcagcgcaggtgcattgatgccgttgcagattgcataaagtccgtcccctaccttaccggagttcagtacatcttcattacagtctgccacgtcgatggttccgttttgaatataaggcgtcaagtccaccagcaaatcattgtttacatactgctggatatacttgtaatccatctggacaatgtccggcatggaatgaccggcagcggccgtagccagcttgttccagtaatctgcccactctgaaaattgtccgtcaaaggtaactccgggattctgttcggaatacagctctaagatagcctgtgtacgcacatttctcacctgattgccccaccaggcaaccaccatctccgaaccatccccggatgcagcgttttccccggatgcagcgttttccccggatgcagcgttttccccggatgctccttctgcctgtgaaccggccgcctttgtatctgcggtaccggaaccgccgcatgctgtcaggcttgccgccgccagggcagctgtaagcacaagtgctaatttctttttcatgattgaaaacctccctcgttctttagttgcttttgatgaattgattatacctgctttttcttgtcaaaccaatcaataaaaccgatgtccatggttaattttccgactttttcatacagtttatgcggatgcaacttttccttgtcctgttgaacgatatggtttatattaatctaagacagtcaattcccactgaaaacaggagtaacgtatgagatacctgaaccagataaaacgtgattttgaaaatctctccatgaaaaataaactgctggccgttgtattgtccaatgtggtgctgattctattcatagcgctcatggggctgcgcatttcctccaatgcatacaatgaacagctctacaaggccattgccggaaatctgtccttttcctcccagaccatttccggcaatttaaaaagcatcgagaccctttcctctgtcatcatctcctcctccgtgattcaggattccctaaaccgcattgacagtacggatgatccctttatatggtccgacaacaacccccgaatcagcgcagccatcaacaattaccagcaggcctacaaaaataacggtgtggctgctattgcgttaaataaccggcatttccaaaacctgactaatttcgtggtcataaacaatgcggatacggacacggtacgggacgcggtggacaaggccagggaacgggaaggagccattacctggaccattgactatgaccacggcctgtatatactcagccgcagcgtcaggaaggtatacaacctggagctggaccatctgggagacctgctggtctttgtggatctggaccggattgtaagggatgccaaccgtgcggtaaccacctacggcgactccggctacattctctttgacggggaccagctcatatacacctctgacgggattgacccggaaaccgccaatgggttcatgaaacagaccggccagccctacagcatcgtacaccagaacggtcacagctattttgcagttaagaacaccattccctactacaactggacctacataaacctggtcccctatgaccagatttccaattccacaggcatggcctaccgccttatcctggccatgctcattgtaggcttcatcgctgccatgacattttccaggcgcctgacccgctacattttaaaggacttcgaccttttaatacagaagatggagtttttcagcagcacggagcttaagatgcctgaggtggaggtggactacagtaaacggaccgatgaaatcagcaggctgcaccagcattttgacaccatggccggccgtatccagtacctggtccggaacaattatgtgaatcagattttaagccgcgacgcaaagcttaaggcgctggaatcccaaattaatccccattttttatacaacaccctggaaaccatcaactggcgggcaaaggcattaaaggaccagcagatttcctccatggtggaatccctgggaaccctgcttcgggccaccctcagcagcaaaaagcctcttgtgaccctggattatgagatcggcctggccggaagctacatgaccattcagaaaatacgctttgaggaccggcttctgttccatgtggagtgtcccgaagagctgggaaaagcccttatactgccccttaccatccagccccttctggaaaatgccatacgctacggcatggaggaaatgatggatacctgtgaaatcagcatacggaccatgaaggaagggggcctgctgattgtggaggtgtcaaatgaaggctctgtattcgaggacggccttcttgaaaagcttcaggacggcaccaagaatgcccacggctttggcatcggcctggtcaatatccaccagcgcatccagatgctttttggggaagcctatggactgtcctttaaaaacgagaatgaaaaagccattgcaatcatcactataccatacaaaacagaggaagatgactatgcttaaattaatcattgcggacgatgaacgcatcatccgcgaaaccatatccaccatcatcaattggaaggaatacgacatcgaggtggtgggcctgtgcaaaaacggaatggaaacatatgacatgataatggacgagacgccggatatcgtgctgaccgatatccggatgcccggcatggacggcctggaactgattcgcaggatttccggtacggacctgaacgtacagttcatcatcctctccggctacggggaattcgagtatgccaaggaagccatgaaaaacggggttaaatactatcttctcaaaccctgtaatgagctgcagatcattgactgtatcgaacagtgcaagaaggactgctaccagcagaagctcatggaacggattgtatcagaccgcttcatggcaatcaacagcatgaaccacaacgtcattttcagcatcatcaatgacagcatatgccagaaccggggttttccggatatcatccgttcctatgaatcctatattgactttaaattcacggtctacaggctgtactatgtgtattttctgccctttgagcatctggagaggtttctggatgatttaaggctgtattgcagccaaaatatttcctccgtcatcatccacggcgtatacgtcaataacacactgcttctgttctttaaggactttgccgcaaactaccaggacctggagcgtttcatctgccagaggcactatccgggccaggccgtagccctggaaaccgaatccacactgtattccaacctggaacagcttctggtggtggttctcaagaaaataaggcgttttggaatgatttattatatcaataattttcatctgctctacacctgcaattacaacacccatatcaatgaattggagcagctatgccagtctatcctggaccggcagccggattccatgcagaagctgaccgatctcataaaggatataaatgacatcacctttttaaaacagattgccagcaacctgttcatgaagcttaccctgaacagtccctgcctctcctccacctggctgactgaactcctggtccggattgaaaatgaacagtgcttaacggacttaaaaaaccttgccattgaccgggtggaggaaatactgagagagcctgacagcgggcagtccgtcagcaccatgacccagcagatatttgattatgtaagccggaatctgcaggatgacaacctgacccttaaatatatttcaaaaaactatctcttcatgaatgtggactatgtcagcaaaaaattcctgaaggagaccggcaccaaattttccacctacctgacggacatgcggattaaaacagccaagcagcttctggcttccaagggtctggataagatacaggatgtggcccaggaagtgggactcggaaacaacccccagtatttttcccagctgttcaagaaaaaaacaggcatgactcccagcgcctacatcacacaggtcctgggaagaccctgcaaataaaaagcgatcattttttataaaagcctgtaatttttacttgacttataccgcattctatgtaagaatatgacgaggcacaaatcagtgccatatctggctggtccggctatcgcactggtagagtgcgaactatttcccaaattcaatattttacaatataatgcgcaaaggagactcccatgagacatttattgaatcccttagacttctctgtggaagaaattgatgaccttctggcccttgcaagggacattgaacagaatcttccaggatacgcccatgtatgcgacggcaagaagctggccacccttttctatgagccaagtacacggacgcgtttaagctttgaggctgccatgctgaacctgggcggcagtgtattaggtttttcatccgccaattccagttctgccgcaaaaggcgaaagcgtggccgacaccatccgcatgatttcctgttatgctgatatctgtgccatgaggcatccaaaggaaggcgctgcattcgtagctgcccagaaggcccagattccggtcatcaacgccggagacggaggccatcagcatcccacccagaccttaaccgatcttatgaccatccgttccatgaagggacgtctggacaacctgaccgtgggcttctgcggagaccttaaattcggccgtaccgtacattccttaatcaacgccatggtccgctaccccaacgtcaagttcatactgatatccccgcctgagctgcgcatcccggacaacatccgtgacgacgtgctcactgcaaataatgttccctttgaggaagtcggcaacctggacgacgctctgggccagttagacattctctacatgacacgtgtgcagaaggaacgcttcttcaacgaggaagattacatccgtttgaaagactgttatattctggataagaagaaaatgaaacttgccaaggaagacatgtatgtgctccatcctcttcccagggtaaatgaaatctccgtggaagtggatgacgacccaagggctgcctacttcaagcaggcacagtacggcgtatacgtgcgtatggcattaatcatgagattactggaggtgcagaaaccatgttaaacatcagcggattacaagaaggcattgtcctggaccacattgaggcaggaaagagcctggacatctactatcacctgggcctggacaagctggaatgccaggtagccatcatcaaaaacgcccgcagcaacaagatgggacgcaaggacatcattaaaatcgagggcggcctggatacggttgacttaaaggtattgggctacatcgaccacaacataacggtgaacattatccgcggggacaagattgccgaaaagcgggcattaaagcttcccaagaaaatcaccaatgtgattcagtgcaagaacccccgctgcatcacgtccattgaacaggagcttccccatatcttctacctggcagatgagaaggcagaggtttaccgctgccagtactgcgaagagaagtacagcgaatttaaataggatgattatggggcgctgcccttaaatacatgaaagagacagtggctgttgagaaatccattcaccacttcaaggacagcttttgtgttgccggacgtaaaacgcagaatgaaaaaactctgcatgctgatttgctgcttgcgggaattgcacagctcattacagtagtggttgctgataaaattcacatttttaatcagaattaaaaacttgtttcgcaattacctatgataatccgtaaaagtccggcgcacatccgccttttcatcaatcattttcaggcgtctggaaaaccatggaagcagggttccctgaatggaaatggataacagaacaatacaaaacaccagattaaacagattatatttcatcggcacctgacgcagtacggcataaatggcaaatacaatagaggccacaccgcgaagccccgcccaggaaaccgttccgatctgtccccataaagaccggaagcttccaagaagcaccgtcactgcaagtggacgtccaatcagggtcaggaataccataattgccgctgagggaagaaatacctttgaatacccgtttcctcccaaaagcacaggaactgcataggcaagaacagccacggcgaatacaaatatggtttttccctctgcaatgtcaaaatgaagacgatttgaagtccggttaaaatcactgtcagcatataggaaatggggtcattggagccggattccatttccagcagggaagcagtattctccttaagattcagatttttagaccgcagaatgccgaacacggaggctgcatccgtggagccgatcacggaagctgtcaaaagactctccagaagcggaagcttcaaaatcagatggataaaaagccctgtaattcctgctgtgagaaccacccccgcagcagacaacagcacagaccggccaatcaccggctttgcctccttaattattccaatggcaaaatacaggttttgccggaactttaacggcttattaacatttctgtctttatctctgctcatttaagcaggctgctccgatgatgcctgctccgttccccagctctgcaaggagaatccgggtgttcttttgggaagctctggaatagattttgggtgctgttttctccttcaccggagctaaaagtgcctctccggctccgcttaagcccccgccaatacagagtatctccggctgaagaatattgataatattggcaattccctcagacaaatcctccataaagccgtccagaacctcacatgctgtggaatctcccttctctgatgcctcaaagatcatgcggccgtttactccggacagatctcctttgcagagggaccagagcatggactcatccgaacgttccatagcctctcttgcccggctcactaaagctgcagccgatgcataagcctccagacagcccttccgaccacaggtacagggatgtccgttctgatggatcaccatatggcccagctcgcctgctgctccattgtctccttccagtatccttccgttcagtatgatacctccgccgactcctgttcccagagttacggctgtcatggaacggctgcaccgtcctgcacctgccagatattcgccccaggcagcagccttggcatcattttccccataaacagggcatggaaaaaggtcttttaacattttcagaaagggcacattttcaaagccgaagttattggcatactcgatacagtctgtttccttgttcactgttccgggaatgccgatccccacgctttccacatcctgaaaggttaatccctgttcctttaaaaggcgttctgtcagcctgtaaatagcctctgccagctcctttgccggttttggcaggcctgttggctcctgaacggctggccccagcactctgttttcatccaccagaccagcggctatcttcgttcctccaagatcaattccgattctcagcatataatttcccctttattttcataatttaccgtttattttaccataagggagaaatgcttttctagaggagtatagccatttgcatatacggtgtaaccggcgctgttgatctcttctccggagtaatgtcccttgaaggagtgctctccgaatccgggaccaagttccattgtcacagatccgtcgtgaacctccagatatccgtcctttaatatcatgccctctcccgctgctgcctccagagcaaatgcaggatgctccagagttacacctgcgggaatgaagatctccaatcttaaaggaagacggtccagtccctcagccttcagatgcagctccagcccctgatccttttcccggatctccagagttgtttttaaccggctgctgatcagtttttcccgtttggtctgatccattttccaccagtcagaggtatcctgtttctccttaaagggcagataataccagctttctgcctctgcctccagacggcagccgtcgggcaactcttctatggtctgaggaatgaaattacggatatcgcagcagctttctccgatttttacacaaagcatcgttccctgagatttaaaatacaaaaaagcgctctttccgtttaatactgtgtaagtataggaaggctttctcaccctcagcacaccggcatgacggaaaaatttgcgatattcctctaaaaatccatattccttaaaatgatatcccatcatttcatcatggttcatcacaatatgcagacagtcgggcgccagatctccacgctccatattatcttttatgatcttatgtgccgctccgtcaaaggcaggacaatgctctctgctgcacatataaagatactggtagaaatatttatccgcatattccagttttccctgatcctgtctggtggaattctgagtgaaaatagtatcgtcagggtccatataggtaagcatcatggacagattgcgttccacatatcccaaaaatgcctcatcacctgtttcctgatacatagccatcatggcattgtttacaactgcattataatttcccgtagaccgctctgcatattctccgtcctcatctccgtcaatgccctctgccagatactgatctgcccgcgccttcagccctgcagcaaatccatcttcctctgcaaacagattagagccctgaagaagagctgctgcgattccccaacggtgattgggcgtatggaagccaccctcgcgaatggcatccaaagccttatgcataatggttaaatacttttcctttaaaaccgtaatggcctcatcagaagaatccccatattttaccagaagccggtatgcggcaatcagccgtttaaagcagaatgaggtatctgccgctgatttaaaattgcaggagggatagtcaaagcttccatcctctctctgggtcctttctataaaatccagtgccagattcactgctgcatacagctgttcatttttataaaaacagctgtccttgtgaaaatatacagccagagcagaagtcagggcataaatcgtgggctttgcttcccagatatcgcctttgattcccccatactgcagggaagccgggtcacctacctgacttcccataaactgctttgttctgtattctgctcccttcagcagatgcgccatataacgttccattgcaagcctccgtttttagccctttacaccgctggcagccagaccgccggtgatataacgctgcaagataatgaaaataacaataataggaaggatggacaaaatggatgctgccagaatggagttccagtctacgcccattgttccgatataactcttgattgcaatctgaatggtaaaattctcctgatcggaaagcaccatcagaggcagaatatagtcattccaacgccacatgaatgagaaaatggtcagtgtaatggtaacggaggatcccagtggaagcatgatcgaccggaaaatccggaattcggaagctccgtccagtcttgctgactctgcaagctccaggggaatagacatataatgctgtctgtacatgaaaataccggttgttgtggttacaacgggaaggatacagccccagatactattgtaaagtcccatttcgctgactaccgtaaactgtgcgatggtcaggatttcaccgggaattaaggttcctagcaggaatacggcaaataccttgtttacatagggaatttccttgcggtagatagcaagggcataaccgcacatggcactgataacaactgtaatcagcgtgcctaccactgccagaaaaaggctgttctttacataggtaaaaaatccgtctgctactacgctgacataggattcaccgctgggtgcctgcggaaaaagatgcaggggataggcaaacagctccgtagaaggtttaaacgagctgaatcccagccagataatcgggaaaaccataagtcctgctacggccagtcccagaaccgtcatacatatggtttctactttacgctttacagatccttccattatacttcacctccgcctttggttgctttaaactgtatcactgcgattacgataaacagaaggcttataaggatgcctgctgcagaagcgtagccgtacttatactggttaaagccctgatcaaaaatatactgtaccatataggtagttgaggaacccggtcctccaagggaaataccctgtaccagtgcgtattcctttaaaagagatacggtagaaaggagaagtacaataaatgttgtaggcatcagaagcggcaatgtgatgttgataaatgcctgaatcttttttgcaccgtctacgctggctgcctcatacagctcctggttaatattgttaataccgcctacataaagaagcatatagtatccggcggaaatccagttggaggccacactgattaccacagttgccagaatcggatttaatgaccactgcaggaaatcaattcccattttctgcaaaataaagttaattaaaccgtattcctgtccgaacatccagttgattgtgataccggctaccagagcagataaaagaaccggaatataaatcagggtacgcatgatggtctttccctttaccagcttagaggtaaccagagccgctaaaagcaggggaacggcaatcttaaagggcaggttgcagactgtatatataagggttcttcccacagtcttataaaaatctgtatcctttaaaatatctgtatagttctttaagccaatcagatccatggtcttccagccatcataattggtaaatgaaaaccagatgcttaagatcagcggcaccatgaaaaataccgcaaataatgccagcgatggaagtacgaacagccagaagctgtgtgtatggcagaatgactgccttgtactctttttcatgtcaatctcctccttgatttctttttaatcattcatgtgctttctgcattccataaagaacagcatggccagagcctgtccgtaaggcatgggcttaagctcaatctctttgtagaaatcctttgtctttcgtcccattggggttccgtaggatacctgatttacaacgcccgtctcatcggtatattccataataggctcaagcgccttaagagcgcctgcagcccagtctgcttccgccagtcccagttctgccccctttaaaataccatatgcaaaaccacaggtagcactggcttctacataggaggtcttatcatcaatcagagtatgccacattcctgtgggttcctgatactgaatcagcgcttctgcctgacgcttccaggtttcttttaaaagcttttccacacttggactgcagggacacagtgccaaaaattccggaatcgctgctgtaatccagcagttccctcttccccagaaggctgcagcaaaatggctctcttccttaaaggaccagccgtgataccagaggcccgttttacggtctgtaagatatttgatatgaagcagaaactgatattccgcctcgtcctgatatttcttttctcccagaattcggcccatgttcgcaaggaaaagaacggtcataaacagtgtatcatcccacagctctccctcatttaaggtatctgaggtaatgtgctgcagtccgccttcctttgttcttggaaaatcagcgtaaatccatctggcccattcccggcagacctccatgtagcgtccattgtctgtttcctctgccacaaaggacatggctaaaagaggagttaccgtatttacattcttggcgggaagcccgatctttaactgtctttcatagtaggaagtcaggatgttcatataccgctcatcctttgtttctttataaagcttccatactccgtaaaggcctacgccctgagtccactcccaaaactggtaccttctgatatcatctccggcaaggctccttgtcttcattccctccataaactgggaatcctcctcgtaaagaaccttttcaaagctgttaagatacagatcaatgtaacggtcaatatccgctgctgtgtatttcatcctctcgctcctctcatcggaagaccttcatcgcttccatcactttctggatctatcctaacactttgataagtcaatttctacatctattttgccttttagctataatagcattgcatattttgctttacgtgcaggtttttgcttttttattttatcaatcatttctcaaaaaggcaaataaaaaaacagtccatcccacaaagaatgaactgttttctgtgtaataaaattagtatgccatgctccagccagaagcctcagacagctgctttgcaaatccgtccagtgcctcttttgctgtgatctctccggatactgcgcgctttaatgcatctctgtactcattatccttataatttctccaggaagagctctcatctgtcataaatgtatctgtaacaaaatcagtctcagcctgcattaatgcaaactcttccttcgccttgtctgtctcaggctcataagcaacatcgttcataacagacagacccttgtgaagctgcagatactctttgtaatgctcttcctcgaaaagccactgtacgaactgctttgccagctcagtattctttccgttctgaggaattgcaagagctgcaccgccgatgattgcggactggcactcgcttccctttggtgaaggcattacgccaaattcgaatttggaaatatcatttgtaaaggtgttgtaattccaggagccggataacaggatagctgcatctccattcttgaaatactcaaccgggttatctgtggtacctcctgcccagattgcctttggcattacttcattgttagcctgaacaaaacgctccagggttgctacgttctcaggactgtttacagttaccttaaagctgtccccatccttttctaccagagaaccgccgtttccgtacatcaggatatcgtaacgtgctcttgatacatcagcagcaaagccgtactttacgccacccttttcctgaagcactgccgcattttcatacagctgttcccatgtccatggattctcctgtgtgggagcctcaatgcctgctgcagcaaatgcatccttgttatagaaaacacaggttgttgtaaactgctctgtgatacctgtaatcgcatccgaagaataggattttcctacaatattaagtgcggactgattaaatctgaaaagatctaccacatcctccatgtttacgaactcatctggataaatctgatgaaggaaggtagtggaaacaatatccggaaggtctttattcttagccatagccgggaacttgcttctcatatcatcatgggaaatgataatctttttaatggtatttccgctttcctctgcccagtggtttaaagcatttccaagagcatcctgctctcccggctcctcagaaagcattacggaaagagtctgtcctgtaatagggcctgaactttctgctgctgtttcttctcccttttttgctgaatcagaaccaccgcaggctgtcagtgctgctgccatagacagagtcagagtcagaacgcctgccaatgctcttgctgatctctttttcataataatatcctccttaatacctcttgtttttgcatttcctctcaactgctttcgatgactccatagtatcattttaatacatcaatttctacgccatttttgcctttttcgatatataatattgtatattttgcttttcacttccatctttgctcttacagacctattttccggtacaaaccttcggtgtaaggcggatggaaaaaatctcatatggtttcatctcaaattccagcgtctgccccttccggcacagctctgtctccggaacaaatgagattgtctttaaatcggtctgttccatcagatcacagacggctgcctcaaaatcaggaagtaaaggaagctccagatgcactctggtacgcattccataagcctcatacaggcggataatcaggtcatccccctcctcagccttctttaccgtatctgtaaaaatgttttcttcggcaatccgtaagaaggaccagctttctgtttttattccgttttctctctgtattatcagaggacaatttaagtcatatgcctcccggattacccctcctctcctgaaatcgcctctgtgtggataaagggagtatgtaaactcatggagaccctgatctgcctgaggatccgggaatatgccggatttaatcagagtcaggctcatcactgaatcatgaatgtcacagccgtatttacagtcatttaagattgcagctccatagccatattcggacagatccatccacttgtgggcgcatacctcaaagcgtgcctgatcccaggtggtatttttgtgaaccgggcgcttcacatttccaaactgaatttcaaaatctgcttcactgctctgtatatcaagagggaaggaggttcttaaaaggagctggctttcattccagtctgcctttgtcttaaaatcaattctggaggtatggggataaaagcagatcttctgttccagaacggaatccatgaaacggcggcggataaaaaggcagcctcttacagggccattttcctccagataaaattccatgacacctccgaatttccatttcttttccctgtatcctgcatcaatattccaagcatcaaactccatggggcgatcctcatataccagaagttcatttccaacagcaccttttttaagcagctctctgtcctctctcagatctcgtataccgcagatttccccctgaccgtcaaattccatatggaaaaatggcgtatcaaagcttacgggccagcctcgttcatctgtcatcaggctggtgatcaccggctcttcttccgccctgacggaagatgaatattcatatactccgattcccttagaaggcgcgtcttttatcaggaataatgtgctgccgtccggcgttttctgtacgctgatgttctccgggcagctcccgtttcggtattcctctgccataacagcctcttcacctgaaagctctgcaacagaggtccgtccaaagcttaagggattaaagacagccagacattcttttttattctcttcttctaacacggacagaacagcggactgggattcgtttacaattcttccggctgactgaatgatttcctcatactgaacagcggaatcctcatacacatcctttatggatgaaccgggcagaatatcatgaaactgatttataagcagaagcttccagtttttttccaggtcttttgcaggatactcatatttcgctcccattacctttgccaaaacagaataaaattccgcatcacccatcaaaaattcgcaggctcgattatacttcttattttttgcctgagaggtataggttccccgatgaaactccagatacagctctccgcaccaggagggaagacatttccggtccatattatcttccaaaatatggaagaagtcctttgcaaaggtctggtgtacacgaggtacacccgcgaccccctcctccattctgcggctctgctccagcatctcctctgtagggcctccgcctccgtcgccatagccataacaggtcagaacatcactgctggtttccttattctgatatctctgccaggttccctttatctgactggggttctgcagtccattgtaggtggtgcttccatttggcatatccttaaggctgcatccgggaagataatttctggtcgtaatcagatgagtcagaacctggcttccatcaatccctttccacataaacgtatcataaggaaaaacattatactcattccatcccagcttggtagtcataaaataggaaagacctgcttttttcataatctgaggcatggctgcactgtatccaaatacatccggcagccagagcacctcctgctttttcgcccccagctctttttcaaaaaaacgtttcccatagagaatatggcggatcagcgactcgccggacgccagattgcagtccggctccagccacattcctccttcggcctcccagcgcccctcctgtatcttttcccggattttctcaaacagctccggagcctcttcccttacaaattcataaagctggggctggctggacataaacttatactccggatactgctccatcaggttcagaaccgtccggaagctgcgcactgccttctgtctggtctgtctcaagggccatttccatgccacatcaatatgggtatgaccgatcgaatggaccgttacccgctggctgcggcagattttcggcagattctttttcacatactcccgcacctcttttacagaccggaaaaattcttctgatcccggctttcttaaatcaaggcctgaaatggcagtatttaaaaatttcataacttcaatccggtccagattctcctcggaaagaagctctgctgcctcaaaaggaaccttcagatcataatacaggcctgcgatttccctgtcatagacagcagccgtaagatggaaaaagtttgtaggattttcgctgttggaataggcataaaacaccagttcaaatctccctctctcctgagccttctctgtgagaatcagatcctgatgattcatatccatagtccctgcgagaattccatccttatatgccataatctgaggattatccgtgttccagatatcatctgcgcctgtatttaaggttacacggacttctttcccttcccattccctctttataacaactcttgtcctgaaccagaaatgccggtcccttccgccccaggtttcacagcttccaaaaggcatccatccatcccttatctgatcctgattaagggtttctgaaaaatggtagtctcccggacggatctctacctctgtcagctcctccttcagagagtagcgccactgtctcaggctgtctaaaaccggtcgtattctgtttctcattacatccatctatccgtcctccacctcttgtttttcctgtcagttctgctttaaaatacctgcaagcttcaggtacaggccataaaaaacagccatagctgcgggaagtatcataaaactgataccatagccccatctggatgaaactgcgccgaagagcatattaaatacaatatctgccactgtagccgcactgataataacacctgtgcgggtagccgctgtgccggacgggtaaatctgctggatcagaagcaccatggtcggatacagaattgccagtgcgaatcccgatgctcccagaatccatacaccgccctctcccagaatacagcctgcacagaacatagctgttccaatgcctccaaagagcttcatacttcttactgctcccattttctgaaccacaggagcgaaaatcagacgtccggctgtcataccggcccagaacagggacaggcttgcagaagcactggcagcttccatggaaaatgcagaaatacagtatgacatcagccagttcattatgccatgttcaccgataaaataacagcccatcatggcaataaaaatccagaatacctttgaatccggctcctttttaattctttccttttcctgctccttctcttccccctgtctgggcacctttaaaaagaaaaacagtgccattaccagaccggcgattcctgaaagaatgccgttcgtccatttccagccctcatagtgaaaggcatatcttcccagcaaaaactggcttccgctggttcctataccctgaataaaaaaaagcacatttaccataagtcccgcatagccggcaaacacagccggagtcaatatgttcacggtggtgtttaaaagagtggatgctcccaaagcaagaaacatggaaaccaaaatccacatatagctgtctgtcaccagattaataagaacagctcccgcccagactgccgttacagccatggccacattctttcttggaaacagatccagaagctttcctccaatacttaaaaacagcagatttcccacatagctgattgtgacaatcagagacagctggctcccgcttaaatcatacctgttctgaaatacaggggcaaaaattccccgaagggcgtcatttgctccaagtcctgccattaaaaaagcaaagcatagaaatgcaatccattttgttcgtttcattttctgattttctcctgtttattcttctgtccttcccggtgttataatccaggttctggaaaattccggttcattgaactgatatttttccagcagctgaggaccgcagcttcctgaactgataccgctctgactgtgatccagacagagaatcgtgctgtctgcctcctccagttcaaaatcatgggccttcccggacagctcctcctgtgtataggtacatgcctggaacataaatgcctccccggatgtgactttaagccccatctcttctccgctgagagagcaccagctgcagtcccaatgagcgccatactcctgaggcttcagataaggccggtgcatggttcgtacatttccctcaaatatgccgtgccaggatgcccgatgcttatccggatagctttcttccggccccattccgcagtaacgcacctgacagaaactcttatccagaaacagacgcaggccaaaccttggaaggaacggaaattccatatccttctttacgttcagctccacccggatctgcccgtccgtgtgaatctgccatctggatttaatatttaagatgcgctgaatcaatgtcatttagttaacgctttgcaatattatggttagattcttaatgaagggtgtctaaccatatttttcccttttttcataaaaacagttgacatacaccacaaaatgtgcggccgctctcgctactgattgactttaataggtagcgagagcggcccttggattagaatcataaattcattctaattcaaggaggtacacacaatgttccatcaaaaaattaaacaatgcttttcccattccgtccatcttgtttcatccgtaatctccgaatttacctattcggacaccgatctgacaaggaacaggaagttccccgccgataagcttatcactttccttgtttcccaaggctcctccagcacaaaaaatgaattgctggacttcttcgacatggatccacagtcgccaactgcttcggcactcaaccagcaacgcgcaaagcttagcccggatgccctggaagctgtatttcggcattttaaccattttgcttctttttatgaccaaaaaaagctacgctaccgctttcttgctgcagatggctccacctttacctttttcagtaaacctgctttcgccccagaagagtatcatgtctctgaaggacattcaataaagggcttttacagtatgcatctgaatgctttttacgacttacagaagcacacttattccgatgcgctgatccagccgatccatcagaaagatgaatttagtgctttctgtgaaatggtcgaccgccacgatttactgactggtacaaaagatgtttttatcggtgacaggggctattgttcttacaacaacatggcacatgtgaaggaaaaaggccagtattttttatttcgcaccaaagatatccattccaaaggacttgttggaaattttgagtttccagatgcagactcctttgatattcaggtaaatgtaactctggttcgcagtcataaaaagaagatatcgattaaagaaggttattacaaacgctttgtggatgcggctgcatcgtttgattacgttgcatatggttccttggatacctacgatttatcttttagaatcgtacggtttccgatatcggatgattcttatgaatgcatcgtcactaatctgccttcagatgaattcccgtcggaacaaataaaacttctatactatgccagatgggccattgaggggtctttccgtaagctgaaatatacggtcggattgagtaacttccatgcctacaaaccagaatatatcaaacaggaaatttgggcaaagttaatcgcttacaacataacagaaacactaatcaatcatgcaattatagaaaagggaaacacgaaatatgaatacaaagtaaatttcagtatggctgctcatatttgtagagtctttctccgtccgaacacagagaaagactccatagatgtgatgtccctgctgacaaaagagctgattccgatacggaatgatcgacagtatccacgactccaaacggcacacttccgaaaacctcgatattttatatatcgagcagcataagtaacagtttcatcaatatctataatacccttttttgaagcagatgtaaatctgcttgtttgccttgcggtaaaatatttacaaaactacttctgataaataatccctatatccttctcttcaatctatccgtttggaacgtcagatctctattttaaaaaaacattctttcttttacaaaaagttaactaaatgacattgtgcgctgaatatgaaccgctgataaagacagctctgttacaagctctgctgatccgtctttcagcaaatgtgcttccgttgaataggttcgtaccctggtgcggtcataaccggctctctcccattccagacggatgcggcggtcattatccgcaggagctcgccagatattgtactccatgggatgggtaaggtattctttttctccctttttaatctccgaaaagactcccaggaacgtatcatatacataggtgaagtcctttcctgttacggtaatccgccgttctgtctgatccagtataagagcagctctgcctgtttccggtaatttttctttcccgcagatctctgttttttcggacacagcctccggcagctctgcctcatcaaagccaagctcccagccttccttcagtccggaaaccggatatctgagcagatatcttactctcaaaaagcatctgcctccttcgggaagcctgcctgtatactgcactgctgcacttccatgaggcggcacggagggcagctccttttgtatgcctgtctctacgatttttccgtcctgaacggcttcccatttcagatacacatagtccttaagatctgtaaaatccatatggtttttaagaacaaccagccccttttcccagtctacactctgtattctggcaggacgatatacgtttttaaattcccgtaagcccggatggggaatccgatccggagacaccagaccatccacacagaagtttccgtcatgaagttcttccccatgatccccgccatagagaaagccttccttcgtttttaccgcatggtcgcaccactcccagataaagccgccgcacattccatcgtatctgtgaattaattcaaaatagtcctccatatctcccggtccatttcccatggcatggcagtattcgcacatcataaagggcagattttctgaaaaaatccggctgtccggctcttcaaaatacctgcatatttcctcctgatccgggtacatcctgctgtacatatccatggagctgaaatcatatttctttacatccggcacatatcttgcgccttcatagtgacacagtctggtatcatcccgttctttggtccaggccatagctgcctcaaaggcacacccgtaagcgctttcatttcccatagaccagatcaatacgctggcatggtttttatcccgctccacacagcgtctcgtacggtccaaaacggcctccgtgtatgccggattatctgcaatccaccgattccactgcctcacatgggtatcccagtcatccacctttttaaataccttatctgtgccatggctctcattgtccgcttcatccatcacataaaatcccatttcatcaaaaaggtggtaatactggggactgttgggataatggcttgtacggatggcatttacattgtgctccttcatcagccgcagatccgtttccatctgctgcctgtttatggcaaagcctgtaactggatcactgtcatggcggtttacaccatggaattttacggctgttttattgataaacagcactccattgtccacataaatctcccggacgccgaagcggtcggtgatccattccttttcggtctgaagctcaatggtgtaaagccagggcgtctctgcattccaaaaccggcagttttccagacaaaaacaaatcctgtcttcctctgtttctctgctccagttctgctctaaaaccacttctccatctggatccagcacacgaatcagcccctccggccggttggcgccgtaaaaggacagctctacagaaatctcagctgaatttccctggatatagggccggataaaataatcccgaaccgcttccttcggacgtttcagtacatacacatctctgaaaatgccgctcatacggaacttgtcctgatcctccagataacttccgtcacaccactttaacaccagcactgtcagacggttatccccctccttcagataccgggtaatatgaaattcactggttgaatgggatacctgagaatatcccacaaaggttccgttgatccacacataaaagcaggaatccacaccctcaaaattcaaaaatgcctccggtgcatccgggcagcttttatattcaaagctcctttcatacagtccgcagggattttcccttggaacaaagggcggatcaaaggggaatggatatctggtattgatatactgattctcatcttcaccatagctctgccatacagcaggaacctctgcctcctttcccctgattactccctcattccaaaaattctccggcagatcgtatacactttcaaaatattcaaatttccagattccgcttaaaaggaaaaaacggtctgatttctccctgtccagaaaataacatcctctgccggaagccggaatataatacgcccggtcaggctctgtatttacatgcaaatggttcatatcctcaaaataacctggtatctgcattgctgtatctcctatgattattatttttttattacagtatacctgcttttcaaagcaataactatttcaattttgtctttatgctatttaggtattgcattttttgtttttttatgatttactgatgataccatcagtgaataagggggcacaactcatgaaaacctatcacaactcgcctcttctctacgaagaaggcttttccattattatcaacgaagtagccacacccattgaaaactccacgttttattactttgactacgataaacgcagccacgcaatcaacatggattttcctcattttcacagcttctatgagctgatgatcctcttaagcccaaaagcataccactttgtagagggaaaacggtatgacctcattgcaaatgacctggtgctcctccctccctctgtgcttcatcagtcagaatatctacccggaccgcccagcgaccgcattatcattggctttatgctgccaaagcagatgaattttggcgcttccggctacaaggagatcctctccgtatttaacagctctgtgcctgttttccgtttccacagagaggaacagaaccgtctgtatcaaaagctcaacgaaatcgtaagcattgcccaggacacgccaaatgtcaatatccgtaatctgcttattcataccaaatttacggaatttctctttctcctgtatgaaatgcagggtttaaaccattatgtccccaatgtagaaaacggagttaaggaaaaaatttataccatcaccaactatatccatacccactatagcgaagatatctcccttgcagctctggcagatacattttacatcagtccctactatctgtcccaccagtttaaaaatgtcaccggatatacggttgtacagtacatacagctgacccggattaaaaatgcacagtatctcctgctcaattcaccgctgcgcattacgcaggtagcggaatccacaggattttccagtttttcacagtttaaccgggtattccggaaattctgcggtatgtctccttcagactacaagctgatttcccaccattcctcttaccgcccaacagctccggatgagcagcagtaattttaccacagctttacaaaaacgcacaaaatgcacaatacacctttcaaaggggctttccagtcaaggaaactgcttaaaaagcaaaggaaacgaaggcattgttaaagtacgccaaaaatccgaaagggctcccaaaacaaaagaattccttccggatttttttatgcatagagcgagggtatcgctcaatcatctaatttgatgattttgcgacaccctctgtctttatttgtttatccatatccatatatacggcgcacgtaccctatccttccatagcgcgtcctacagatacattttcctgtctgctttcctttttccctccggtcctatgtagacagagttatcaaggaccgggaccggatacgaaccgtgtaaatcggtatcagggccttccatccggcttcccccgcctttccaaatatgtcccctacttatcagcaggcacgatttccagccagtaaccgtccgggtccttgatgaaataaattcccatgccaggattctcgtagcagatgcatcccatctcctcatggtgcttgtgggtgccgtcaaaatcatccacatggaatgccaggtggaattcgcactctcccagatcatatgcttccttcctgtcccgcagccaggtcagctccagggtaaagtccgtcactccgtctcccaggtaaaccagcttaaaggaaccgtccgaagcgttcttctctctcaccggttccaggttcagcgcctctttataaaaagcaaggctcttctccaaatccagtacattaaaattaaaatggttaaatgtaatcataggttgctcctttctcttttaaaaaaccggcctgcaccgcaggatgcagaccggcaattgtttcatacgtttagtttttgggaaccatcacttccatgccgcccatgtaaggacgcagcacttccggtatcttcacactgccgtccgcctgaaggttgttctccaggaaagcaatcagcatacgcggaggcgccaccacggtattgttcagggtgtgggccagatactttcctccgtcctctccctgtacgcggattctcagacggcgggcctgggcatctcccaggttggagcagcttcccacctcaaaatacttcttctgtcttggggaccatgcctccacgtccactgacttcaccttaaggtcagccagatcgccggagcagcactccagagtgcggacaggaacatctaaggagcggaacagatccacggtgttctgccacagcttatcataccacatggggctttcctccggcttgcagaccacaatcatctcctgcttttcaaactgatgaatacggtaaacgcctctctcctcaattccgtgggcgcccttctccttgcggaagcagggggaatagctggtcagtgtcaggggaagctgctgctccggcgtaattgtatcaataaatttaccaatcatggagtgctcgctggtaccaatcaggtacaggtcctctccctcaatcttatacatcatggcatccatctcggcaaagctcatgacgcctgtgaccacattgctgcggatcataaaaggaggtacacagtaggtaaatccgcggttaatcatgaaatcccttgcataggaaatcactgcggaatgaagtctggcaatatcgcccatcaggtaatagaaaccgtttcccgccactcttctggccgcgtccagatcaataccgttaaaccgctccataatatctgtgtggtaaggaatctcaaaatccggtaccacgggctcaccgaaccgctccacttccacgttctcactgtcgtccctgccgatgggcacggttgggtcgatgatgttgggaatggtcatcatgattttggtaatcttctcagaaagctgtccttccttttcctcaagctccgccagacgcgcggaattggcgttgacctcctgcttcacggtctctgcctcatccttcttcccctggcccatcagcatgcctatctgcttggacagcttgttgcggctggcccttaaatcatcggcttccttctgtgtggcccttgcctccgtgtccagtgaaatcacttcgtccaccagcggcagcttgctgtcctggaatttattcttaatgttctgctttacaatgtccgggttctctcttacgaatcttaaatctaacatggtattcctcctggatttccttgatataataccttccaattctggacaggtattcctgtactgttaaagagtatataacattttaccatgaaataaaagccctttttctgtttttcctgctgctgttttcctgctgctgttttccttccgcctccctgctgtaccggcatacgccgtccacgtaagtggcttccaccggaatgccggccagctcctcaggagaggtctcaaagggattggctcccagtatcacaaaatctgccagcatccctggcgcaatccgccccttcacttcttcctcaaaggatgcgtgggcgccctccacggtaaaggaatccagggcctgctttatatccagtgcctgttccggtaggtatgggcccacatggtccttcaccgttgtcctggtgaccgcgcactgtattcccttcatcacatccggcagctctaccgggcagtcggagccgttggaggcatgggtggtttcataaagggtcctgaaatgatagctggacgccgccctctcctttccgattcgttcctccacgatgtggatgtcataatccaggaaaatagactggaagtatgcgtgcagggacagtttcgcaaatttatcaagctggtccggcctagtaatctggcagtggacaatgccgtgccggtggtcctttctgggacactgggaaagggccttttcgtaggctgccaggatatcatccagaattccgtcccctatggcatggacggccacctgcatcccatgggaatttgcatatcccaccatgtcctcgaactgctgtctggtgaaaatgggaattccccgggtggaggcatcgtctgcatagggctggctgagataggcgctcctggctcccagggaaccgtctcccagcattttaaggggaccaatcttaaaccaatgatttccccagcccgtgttatatcctttttccacgaatcccttcagcgcatccagattcgtaaactgggactgttcataaaccctgactgtcattcttccctctgcgtccagttcccggtatgcttccagcacccgttcatagggcacattgttaaaagccagcaaatcgtctgtctgggatgaagtgactccataacggttgagagccttggacgctgccagtatcatttcctttatgtcctctttggcgggctcaggcaggcatccgtagatcaggtccattgcattttcccggaatattccgttgggctccccgctttcgtccacctcatagagcccgccttccacctggggcgtgtttcctgtgatgcctgacagatgaagggccatggtattcaccacacaggcatggccgcaggttcttgtgaggcagatagggtaatctgtggatatcatatccagatcatgacggttgggaaaccgcttttcatcctcaaagtaatcgtgattccatcccctgccccttacccagacgccgggctttggggattgttcccggataaattccttcatatattccttcatcccggccagggagtgggtgtgctgtgacaaatccgctgcgcgtaaggcatttccatagttcaaaaggtgcatgtgggaatcattaaagcccgcgcacacaaaccttccctttaagtcctttacttcatctcctgattccttcatggccagggcgtcctcgtcggtgcctgcgcagacgaaccttccatcctccaccacaaaggcctggcacaggggaagctcccctgtgtatacggctccattccggtatattgtcctcatgtcgtccctctccttattccgtcttctccagcttctttttatcctcatagaacagcggcatatccctatcttccagtgttccgatattcatatagcgggccttgtaatccttcagaagcctgaaatatgtgcctgacaggataagcacgacgaacacattgatgaaagttgggataccgctggtgatgtccaccagggtccatatgctcaaatcacctacatgaatcaggtaaagggtaagtaaaaagggaggaagggcataaaaatacttaaacatgcgcagcagccatttcttcaccgtgggatggttcatggccaaatgacgcagggtcgcctcatagtacacataccagcctccggaagtggtcacggagaaaatcaccatggcggccgtcataaacacggtgccgaaaaatcccagattgtgctggaacacattgagggcaagagttgcattggttgccccggaggtccattcaccggtaatcagcacgctgagcgctgtaatagtacacacaataaaggtgtccacaaatacctcaaaggagccccagagtccctgctccacgggatggcgtgtcttgctggaggcgtggaccatggggcttgtaccccagccggcctcattggaataaacgcttctctgcattccggtggcaatggccttggacaccgtgactccggcaaatccgcccatggcggctgtacccgtaaaggcctgggtaaagatggagccaatggtgggaatcaggttgccgatgttcagcacaatgattagcaggccgaaaatcaggtaccccagactcataaccggcaccagcttcacaaatatcttgctcaaattcttaacgcctctccagatcagggcatagataaacaccaccagcagcagggatgccaattcctggggaatgccaaaggactgggccagcacttctgacgtggtaaagttggatgcgctgataaagaaggtggagaatatgccaaggccgaacacaaaggccagaggaagccatttcttaccccagcggcgctcctccccaagaccgtactccatgtaataggtaggtcctccgtatggatttccctcctcgtccgtacggcggtaatacacggccagagtaacctccacctgcttaatcagcatgcccatgaaggctgtcagccacatccagagcactgctccaggtccgcctgtggtgacggctgtcgccactccggcgatattgccaaagcccacagaaccgcctacagccgttgcaatcgcttcataagggcttaaaagtcccttgtcgttttcatcggcggcatggtcctttctcaggatgcatccaagggtcctcttaaagatgtaccccaggtggcatacctggaagaatctggatcggaccgtcacgtagatacccgtaatgatgatgagcgcaatcagaggaggcccccatatgatttcaccgtttaaccagtttaaaaattctgtcattttcttaattccccctattggttctggattgcgataccatggcggcccatggggcactgccagacacgttccggcactgtacagaaaaagcaatgaccccaggccattgctttccataatcatgtatctgcttaagaaaatccagccaatagcgccaccactttaaaagtgagagtatgcagcctgtttgactgcatcccaacacattccgccggcagacagaatctgtttcggcagtaatccctttccctgtgttctccggcctgccggcctccgggacaaaaatccccgctgtcggccaccctgtggatggcatccattatcacacagatactaatgcttaccgcgcctctatcgcatcctatattttaacattgccttaacatcatactatttaaagctgaagctgtcaacgtttttcaacatttcccggcccgccctgactgtccggactgtctgcgcgttccgccagctttcccgcctcatgtctgctgtccgccgcgcggaccagcacacccatcagttcctcaaagcacacgccattggcaatggggatgtcaagctcctccgacctggcgatgcaggcttttacaaatgaggccgccagacgcacagcgctgtccaggctccatccccttacggcagcagccgacacaacggaggaaaatacatcccctgttcccggccgctcatggcccacccgcctggttctggggaaagctgtcctctcgccctctgccaccacattcatgatgaagccgccctggtttacacctgtaatgaccacgcattccggtcccatggcctggatttccccggccagctcccccagctctttcctgctccatccatccctgcggtaggtccgtccggtcaggatacacgcctctgtcaggtttggagtcacgatatcacccatggataccagctccttcatacggctgcacatagccggtgtataggtggcgtaggtttccccgtggtcccccataatggggtctatgattacctttgtgtcttcctgcctgaactgccgtatgacatccatcacaatctcaatctgtgcttcggaacccaaaaagccgctgacaatgccgtcaaaggtcagctccagctccttccacttgtgaataaactcccccatcttctccgtatagtcgtcaaagaaatagacaggaaaacctgtgtggttggataaaatggaggtgggtatggggcagcactggaccttcatggcagataaaatgggaatagccactgtcagggaacagcggccgtatccggataaatcattaatcatggcaatctttttctgtcggtaaacactcatgtcaaatctcctgtcatctgaaccggtcaaaaagtccggcccttataagtgtactgcgaaggggcatgtagatgaccaccgccgcaacggcagacatcaccgcattgatggaggtggaggcaacgttccaggccagcaccagctccgctgccggtttgcccagaatcgccagcttgtaataataacccaccagcgggtcaaatatcacgttgaacagcagaccgcagacagaggccgccaccgcgaaacggaacacatggcccttatcagagctctcattgattctgccgattttgtgggccaccagaccggttatcaggccgatacagagctttagcaggaaggtctttggcgcgtataccacatagatggggtcaaataaatccccaatggtcattcccagggccccgcccagtccgccgtaaaagccccctaatatcagggctcccaggacacagaccgcgttgcccagatggatggaagtggcgtcgcctccgggaagggtaatcttaatctgtaaaaatgtaaaaaccacataggataatgccgcaaacaggccggtcagggccagcttgtagatacggccgtcctccaggcccctatggcctgctgtcactgcactggatgtcttcatataaattctctcctcatattgtatatttctctctgcatcaactgcattcattcatgccacctatggtatcactaaggtggaatgttttaaatatccagtttgagaagttttggccagtccagttttatcaaaaacaaatgtttctatcagagttgtcagtcgtgggattccaccacaatcagaaccccgtccgtgaaggtaatggtaccttcctcccccgcaagctcattgctgatgcagagacttgtccctatctcaatgtccttctcatggagaggatacttaaagccggtgagagtaatgcctctgacctcctgggtaagcggcaggaaggaaatataatttccccaggcctcattcctcttaaaggtccgttccccgtcaataaggtagatacggttctggctgtccaggatatatgcctccattcccttttgcaggcagggaaacagcagatggatgttgcccagcgtatggtccatgcggccgccggtggcccccagcaccaccacctcggagcatcccgtggcctgggcctttaagagggccagctccgtgtctgtctcatccttttccggctggcgggcatcccatacaatatgttccatcctcctgtaatatgccagtacctccggctttaccgtgtcaaaatcacccactatcatatccggttccagtcccagggctttcacggcctccagtcccgcatccaccgcaatgattttatcaaatgtttcctgtcccaaaaaagaaccggcgaaggacaggtccagttttccgccggttataatcagacaacgcttcatttctcatattcctttaaaatatccataaattctcttgttctggcagacgggtcccggccaaaaacagcggaaccagccacaaatatattggcgcccgcgtctatgatttcccggacatttcccgcgtttacgccgccgtccacctggatgtccgtctttaacccctgctcattcagcatgttcctgagttcgcgtaccttgttaagggtataagggatgaacttctggcctccgaaaccgggattcacggtcatgataagaaccatgtccagctgcccgaggatgcactccagggaacgcaccggagtggcgggatttaaggcaacgccggccttcagtccggcttccttaatctggttcaccacacggtccagatgtgtgcaggcctcggcctggactgttatgacatccgccccgcagtccttcatatcctccacatagcgtcccggctcctccaccatcatatgcacgtcaaaaacagccctggtgcaagggcgcaggctcttgattaccggcatgccgaaggagatgctgggcacaaaggccccgtccatcacatccaaatgaagatactcggcgcctgccccgtatacctccttcacctgttcccccaagcgggtaaaatcagccgcaagaatagacggcgctaatttgtaatacatgtctagtacctccttttatttttcagctcctcatacataaggatgtaattgtcataccggctgcggctcagatccccccgtttaagggcttccttcacgccgcagacccgctctcccacatggacgcatcccaggaatttgcactcatcctcatatggcccgaactccgggaaataatgtttcagttctccgggttccagaaagtcaatgaacatggaactgaatcccggtgtatccatcatgtaggttttctcttccacataaaacaattcagaatgacgggtggtatggcgtcccctctcaatcttgcggctgatatctcctgtctccatggcagcctggggctggatgcagttggtcagtgaggattttccaacgcccgagggtcctgccagcaccgaggtttttcctctgagaaattttctcattttttccagtcccgtatcgtcgtaggtgctgacaaagtggacctcataccctgccctctcatagatggcgcggtacttatccacaagcccggcctcccccagatcaaccttgttaaaacagatggtgaccggcacgctctgaattcccatcatcaccagaaaacggtccagaagattcagattgggttccggatgggtgatggcaaacactaccagggcctggtccacatttgccacagccggacgtatgagaacgttggaacggggaaggatggcgtcaatattgccttccttctcctcctcatccaaaacagaaaactccacattgtcccccacaaggggtttgattttgcggctgcggaacaccccctttgccttgcactggtacacatggttcctgccgtcattgacgtaataaaagcctgcaattcctttgattatcttacctgtcatatacgcctcttatcctaccgggaaaaatgccaccggataggacttgattactgttaaattatctgcatccaccacttccaccataccgctgtccacgccgtacgcccccttgattctggggaataccacgggtacggtctgggcgcccacaaccagccttggactcataagggtcgtataaacagaagcgccctcatcattggtctggttcaggcggatcagcacacgcacgctgctggtctgggaagccggtcctatatagttgctcagggaacatgcctcgtcaatggagccgatgtaataccgttcatctgaagcctgggtctgtgcaggcttcccgctgaccacatagtccactgccgtgcccggtggaagtatggttcccggaagctctgactggctgataaccaggccctcctccaccgtatcgctggcttccgcggttacattgcctgttaagagtcctgctcctgccagaagggcgtccgccgatgtggaagtctgtccctgaagattgggaacccgtccctccacgttctgtgaacccttgctcacatagaggctgacgccctcgcccaccttcaccacctgagggctgaaacgaatcacattgccctttatgacagtgtcgctgttctcctctttgacctctacagtcagtcccttctgctccagcagaagcctggcatcctcccctgtcatctgggtcaggtccatggcatttaagtccaccttatcgcttcccttgctgatggtcactcccacggtactccacttcttcaccaccgttcctgccaggatatcctggcccataacctggccttccgcatagttatcggaatactcgctgcctgtgacctccatcaccaggctgctctccttcagtttttccctggccatatcctggggcagtcccaggacgctgggcatatttatctggtcctccgtgttgatgtccaccacggtggtggaaccttcggtggtcatggcaacggtctctgtggctggcttactgctgctctgcctgaaaagcccggtgagccgtgaaaatacaaacagcaccaccgccacgataatgatggcagccacgatgccaaaggccgtgatgatgcgctcaaactgagtgcttacatcatccccatcattctttttccgggtgtggatgcgcccgtcttttttgtgctgatccctggaccgtttcctgtccggatgctccgtctgttcctcctccggttcctcaagggtctcctcaggataggtcttcctgcctccttggatgctgttcagctcttcccttgtgatgggcctggtcttgccaaactcatcctcttccccgtccttgcgggcataaatgtccgcgtccgggtccatcagggcggtacgcaggtcctcaatcacatccgctacacatgaatagcggcggtccgggcgtttctgggtacattttaatataatctgctccagggcgcgggacatgtccggcacgcactggctgggcggtgtcaccggttcttccagatgggccagggccaccgtaaccgtgttatccccctcaaagggtacacgcccggttaccatctcatacatggtgatgccaaaggaataaatgtcgctgcgctcgtcgcagtagccgcccctggcctgctccggcgaaatatagtggacagagcccacagccgtagcgttcatggtctgggaagacacggctctggcaatgccaaagtcagccaccttcaccttgccgtccctggatataatcatgttctgaggcttgatgtcgcggtgtatgatgtgctgttcatgggcagccgcaatgccctggcccacctgaagggcgattccaatggcttccttgctctccagatagcccttgttctctatataattcttaagggtgatgccctcaatcagctccatgacaatataatggtacacatcctcatccacaacatcatagacatttacaatatttgggtgggacaggcgcgccgctgactgggcctccatcttgaacttgcttacaaaattctcgtcaaaggcaaattcctcttttaataccttgatggcaaccagacggtccagggtatggcaccgtgccttatacaccacggacatgccgcctgagccaatgcgttccagaatctcataacggttctggagatatgttccgggagttaacatacgcctgcctcccttcctgacggatttacaagtaccaccgcaatgttgtcaacgcctccctgacggttggccgcctctataagaagggctgccttttccttaaggcttccctctcctgtgatgatgtcatacatggactggtcctccagcatgttgctgagaccgtcggaacagagcaggatgtaatccccctcctccaaatccacctcaaaaaaatccggctccacttccctgccgattcccagagccctggtgatgatgtttttgcgcctgttgtaatcctcgcttcctcttctcatctggccgatggccaccatctcctccacataggagtggtccctggtgatctgccggatggaatcaccgtgaatgagatagagacggctgtctcccacattggccacatagaggatattgtcctccaccacgccggctaccagggtgcaccccatccctttcagttcttccctttttaaggattcttcatacagcatcccattcacagcctcgatgcccttttttaactgcatgacaggagagccgtcccctgccctgtttatgtatatcaccagattctccaccgcgaaccgtgaggcataatcgccggccctgtggccgcccatgccgtctgccaccagaaacaagttaggcagggagcccaccttttccggtgaggaataaatatagtcctggttcatggttctgacccggccaatgtctgtcaaagcgtatgcttccatggtcatccctctccttccgtgcattggggtgctgccgaagcttccttatagcttctgcgcagctggccgcaggctccgcctatatcccggcccatttctcttctaatagtaacatttataccgtttttttcaagaagatttttgaattcctgtatggccttctggcctgactggacgtaatcccgctccttgatggggtttaccggaatcagattcacatggccgtgctgatccctgataagcttcaccaaagccctggcctcatccaaattgtcgttgactccccgcaccagactgtactcaaaggtaagacggcggcctgtcttctcataatagtaatggcaggcctccagcacatcatgcagtttataggtgcccgctatgggcataagggttttcctcacctcgtcattgggcgcatgaagggaaagagccagagtcaccgccagaccctcctgtgcaaatttccggatgcccggaacaatcccgcaggtagatatggtaagactccgctggctgatattcagccccttgtcatgggaaaccagacgcagaaagcggatgacattgtcatagttatccataggctcccctgaccccatgaccaccacattggaaacacgttccccggtgatggactggatcctgtatatctgatccagcatctctgaaggacgcaggttccgttccaggccgtccagagtggacgcgcagaaacggcagcccatacggcagcccacctgggaggaaatgcacacggaattgccatggtggtactgcatccacacactctcaatcacatggccgtcctccaggccaaacaggtacttcctggtaccgtccacctgggaaacgcgctcatccaccagcttcaggcaggtaaggctgtaattctccttaagcttctgcctcagttccctggacaggctgctcatatcgtcaaatttctctgccagcttcacatgcatccagtcataaagctgttttgccctgaaagatttctctcccagggcagccatctgtgctgtcacttcttccagtgtcatggattttatatctttctttccattgcagtccaataaatccagcataaaaactccctccaaaacacgctctaaatcccatccgggcctgactcaccctccgcacgtctgaacacgctgatgaaaaacccgtcatagggatgcacccccggcaggaactgaatccaaccttcctttaacgaggactcctgaggcaggccgccaaaccggtctgtcaaatctaccggcacaagcggaaaccgctcccttaaccaggcggcattgtcctggttttccagcctgtcaatggtacatgtgctgtaacatagaaggccgcccggcttcacatactgccagacaacagacaggatctcccgctggagtcccgccagctcctcaagcttctcaggcgtcatgttgtacttgatgtcaggctttctccctatgattcccagaccggaacagggcaggtccgctatgacaatatccgccttcccggcggccgacggatccggttccagggcgtcccacaccagggtcttcatgttggtcacgccgcagcgggccatgttttcctcaatcagggctgttttctggtatgtaaggtctctggcctccaccatcccggtgcctctcagcttatccgccaggtggaggctctttcctccgggggcagcgcacacatctataatataactgcctttctccggggacgcaatctcccccacaaaggcagaggtcacatcctgtacctgtatccagcccttccggaaggcatccagcccctccagataatcgtacccgtcaatggctatcatggactccatgaaaggcagctccctgaccaaagtcccctgcgccttaagggaagccagtacgcgctcccggtccgccctgtgcaggttgcacctgacccaggtgggcttatcctcaagaaaagaggcggcaatcttccccgccttctcttttccaaattccttttcccacatggcgtacatccactcagggatactgtacctcagggaaggagtgtcaaaggtcagtttctccttttccctggaaatagtccgcagcacaccgttcacaaagcccttgagcccggaaaaatgacgtttcaccgccagcttcaccgcctcattgcagacagcggaatccggcacgcggtccatatataaaatctggtatacgctcatccgcagaagactgaggatgaacggcttcatcttgtatatttttgtcttggaataccggtttatgacttcgtcaatctgtatcaggtattccagtgttccttccacagcccgggtgataaaggaacggtccgccttgcccaggtactggtacttctgcagggcctggttcagtacaaggtgaacaaaagccccctgttccagcacctccgtcaatatgtccaggacaatctcccggttttccagtcctctgtctaaggtctttgccatctgaatattctcctctcagggcctgtctgaatatgaattcccaccctagtcattcctgcggttgccaaataatatcagcagccggagaagctgaaggatggaggctgccgctgccgccacataggtaagggctgccgcgttcagtacctttctggtctgtcccacttcctgccccaccaggataccggtggaatccagaagggtcaccgctctgtgggaagcatcatactccacaggcagggtcaccagctggaacagcactgccaggcaaaacaaaaggatgcccagattcaaaaggacagagcttcctcccagtaaaagtccaatgataatcagaggccagcacagctgggaccccagattagccgccggcaccagggccgcacgtatcctcagcggggaataatcattggcgtcctgcatggcatggccgcactcatgagccgccactccgatggctgcaatggatgtggaattatacactgcgtcggacaggttcacggtcttgctcctggggtcgtaatggtctgtcaggttacccggtacgcggcgcacggtcacgtcataaattccctgattggcaagaagcctcttggctgcctccgcgcccgtcattgcgcacatgctcctgacagcgctgtagcgctgatacgtggagttaagcttggcagaggctgccatggatatgactacgccaatcaatatcagcacataggttgggtcaaaataaaacatagggtaaaacatcatcaatcactctctttctttacaaacacgtccccctccgggatgggatatccgcggagaaaagccggggtgtccatgcgtttctttccttccatctgaagctccctgacagacagcaggccgtctccggtacagaccaccaggctgtgcttatccgaacacacgactgtgccgggagtaatccctgtttctgaggggactcctgattcggacagaaaggcggcagcttcccggcctgtagtcacatcagccgaccatatctttattgtcttcccattccacagggtatatgcactgggccacggatttaatccgcgaatcaggcgttctatggacaccgcgctctgattccagtcaatatccccaagggactttgtcagcatttttgcatagcaggtgccctcatctgtctgaggcgtacggaccagagtgccttcctccagcttcttaagcgtggataaaatcaaagctccgcctgccagggaaagcttgtcatggaggctgcctcccgtctccttttcctctatggggattaccgtcttttccagcatgtcccccgtatccaggcccacgtccatcatcatggtggtaattcccgtctccctttcaccgtctatgacacaccactggataggcgcagcgccccggtacttcgggagcagggacgcgtggatgttgatgcagccgtattttggaagctccagcactgccttcggaagaagctggccaaaggctatgaccacgtacacatccgcctccatcccctgaagaacctccacaaaggaggcttccctcaccttcgccggctgatacaccggaatgccgtattccatggcctgtattttcacaggtgtcatctggacttcctttcccctcccctttggcttatcgggctgggtgaccactgcaattacctgatgaccggcttccaccagcgccttaagggcaggcacggagaaatccggtgttcccataaatacaatgcgcataaactacactcctattctgtgatttcttcctcgtcggcggctgtatccaccaattcgccttccaccagctccacatacatccggccttccagatgggcgcactcatggcagatggctctcgccagcagcccctcgccttccagctcatagggctccatattttcattaagcgccttcaccttcacgtagttggggcgggtaacaatgccggacttgcccggcaggctcaagcatccctcgtagcccgtctggctgccgtcggcggctgtgatctcggggttaatcaggacatactggttcccgtcatccacatcaatggttacgatctgcttcagcactcccacctggggcgcggccaggccgcagccgttggcctggtacatggtctcaaacatatcttcaatcagctccatggtgcgctcattcatcgccttcacgggcttacacttctttgttaaaatttcgtctcccataattcttatctgccgaactgccatctcttttcaatctccttcgtcatgttaaatcgtactgcacagtcagtccatcacggccttctaacccctttaggccctcttccgtcattttcctaatctgtatcagtatatcataattttcatgctttatatataaaatttttctataaatatcattaactttgtataccgccgcattgaccggtcctatgagccggaaggacttgtatccctgtactttttcctgctccatgcgatccgcccactgctgcacccaccctgctgccagatccgctgtacgggccagggtcccttctgccggacacgccatctgcacggtgagcagcgccactgcgggaggatatcccagcagtcttctgtaagccatctcctgcctgtaaaagctcacgtaatcctgggtggccgccgtgcgtatgctgtaatgatccggctgataggtctgtatcaccacatttccggccagctgccctcttcccgcccgcccggccgcctgggtcaaaagggcaaaggtctgttctgcgcacctgtagtccgaggcatagagggataaatccgctgccagggcccccaccagagtcacctttgaaaaatcatgccccttgacaatcatctgggtgcctatgagtatatccgcctctcccctggcaaaggaggaaagaatctcctgatgtccgccttttttggaggtggtatccaaatccatcctgagaatcctggccttaggaaaaagctctgctgccatggcctcaattttctgggtcccggtgccaaaaggcgcaatatatggtgaaccgcagacaggacatttctttggctggggaatggagtacccgcagtaatggcacatcatgcggccatcccggtgcagtgtcaaagtaacatcgcagtgagggcatctgacagcctcgccgcaggaacggcaggacacaaaattggcatagcccctgcggttgataaacagcatgacctgttccctcttttccagccgttcctctatcagcgctttcagacgcctgctgaaaacagatcggttcccctcctttaattcttcccgcaaatccacgatctcaacccggggaaggcaggcgtcctcctttgccctctccttcagcgtaaaaagcccgtactctccccttaaagccctggtgtaggattccagggaaggggtggctgaccccagtataagggaggcatcattcatctgagcccgcttagccgccgcctccctggcatcatagcggggggacagttcgctcttataagcgttttcatgctcctcgtcaatgatgataagccccaggttttcaaagggagcgaaaagggcggaacgcggaccgatgacgatgtcaatatcccctgtcctggcccgttcatactggtcgtaccgttcaccggcagacatacgggaattcatcaccgaaacccggttgccaaagcggctgtaaaaccgcatgacggtctgccaggtaagggaaatctccggaatcagcacaatcacctgacgtcccgccgacagcacataggcaatcagctccatgtaaacttccgtcttaccgcttcccgtcaccccgtgaagcagataggtccgccggattccctggccgtactcccctatgacagcatctgcaatctcccgctggaacggattcagctcaggcggagcgccccacagacctgattcctgttcatccgaaacgtcctgttttctctcctggctgcccataagcagcttcatttcctccaggggattccggtatttctccaccacctccacggctatgattccagcctccagaagaggattaatggctgaaggcgtaaggctcagccggttcatggcctcctcatagggaatggtgccggtctgaagcagcgcatctaaaagccgcagcttagccttatgtttctttctcccggcttcctccgccagctctttaagcacccccttgcccaccagggtgcggattttccgcttgggagcctccctgaccttctgcttcacaggcagaactgtttttaaggcctgattcatggtggatccataccgctccttcatccaccaggccagccaaataagctgggactctgcagccacgcttccctgcacaatcccagccacatccttcagtttatgaacatctatctgagcctggtcagtcagatccaccacataccctttgcgctgtctgtttccctgcccaaagggtatgcggacctgctgccccacctgaatctttccccggagctcctccggtatcctgtactggaatgtcctgtccacattttcatgggaaatatctatgataatactggcatatctatgcgccacttacgtcacctgtctgtcttgttattttgtactttggttattatacatgagaattgagtaaaatgcaaatggggtgggggatgggggatagggacgcagacgtggcggggggattccgtccgtgagagggaggcgggcggggatggattgatggtttccgcggtggcagggtctaaggcggcggggcggggatttatttttggaatatgtcaattgcatggctggtgatgcctgttaagtctttccgttcacaggtggcgtagtggtattttaaatataatttgaatgtttcatcgtccattttgtcgattgcttcccgtatgagcagcgcacagccgtcagccgccgcataatgcaggcgtgttgttgggaatatggacatcaaatcgtcgatgtcttctttgcgtacaagctcaaacaaatcctttggctcggatttggctgcaaatgtttcggggtccagcagtccgttttttatgtattcagctgcattgatattgccgcggttgaatccttcgtccaggagacagccgtcggatatgacatatgcggcaaagattatgcctccctgctttgtgacgcggatggcctcgcccaatgcctggcgcttttcttctttgctgtacagatggtataggggacccaacagcagcgtgatgtcatatcggttgtcaggaaacgcagataggtccagtgcattgccctgggtaattgttatatgttctgttggcagcatatgcctgcggaatacttcgatgttatgggggaccagttccactgcgtcaaccatgtatccctgacgcgccagcgcatgggaataacggccggttccggctccgatttcaagaacacggcttccgggttttatgtatttttctatgtagcgcatggttgtcagaaattccacggtcccatgctttggactcagtcggctgtcctcgtcatagctattgtaataatcaatgatgtattgatttgttttcatattgcacccctatgtttttattgattcggacataccgctaaagggataatgtccagtccggtttttcctgtcttatgagagctgtcagcatgtttgcagccattttttctatgcggttcctgtctaatgttattttttgcgccgctgccaggactgctatgccatgggaataaaggaataaatccatgaatattgcttttgccggctccggttcaattccaacggcatccgaaaatatcttttccctcttttcgttgccagcctccttatagaaatcctttggctcctccatgctcagttccatatggtttatgaataaaagcctgaacagatgcgtctcttctttggcaaactcaatgtacgaaaccggcagaaccagacatggatttatgttttcagaaccgctgaaatcctcaacatactgactgtaaaattcataagcataatcaagaaattccctttttaactcatccatgttctcataacatgtaaaaataggccgcgtggaacattgtaatctgcctgaaatactcctggcattgacagactcaaaccctgcctctcttgtaatgtccagaaccgtattcagaatcatttctttcgttatctttgctttgggcggcataggcttacctctctcattttcatgtcacatcatggtcattgagcaagttatataacatacgttgcactacgcttgttatattacatttgttacactacgtatgttgcataactattgttacacaacaatcaaaaactgtcaagcgatatttagaagtatttagtaatatttatacgttttatagaaaaccgtgtcttatgacgcttcatggtgattatctgaattatctggcagaacgttttatggcaaaccccatccaaaaagtacaatttctccatcaataatcgtattagctgcacataccagcaggaaagtgattttcatttttgaacaatagcaggaccgcaccatttcccccagccagccattaactttttccgattgtgaggtgaagtgccgggaggcgtttcatatgtagtgggtggaagcaagggggggaaggaagctggggatgcatccccaggttccttcccccttgctcccacgaacgcggcacccccgcctccccgcgcatcttcacctctcactccacaacccccgctctcttctcaaaccccttaaaccttcctgaaaacatcaatgcccggaatatccagtcaatgaacatgccgtaccataccccggaaaggcccaggtcaaatatgtatacaaagaggtatgcaaacccgattcggaatacccacatggagaatacggataccgccatggtgaactttgcgtccagggaggccctcagggcgtgagggatgatgaaggccaggggccatattatcatggctatgctgtggatcaggagcagctcacgggccatgagggctgcctggggggacagatgatagattcccaccagcgggccggaccagatgaccatggcagtgctgaatacggccaggattccataaaccaccagaataagggactttgtgtcgttccttgcttccttcagacggccggcgccgacgcattggcccactatggtcaccaggcctaagccgatggcatttcccggaagatagaggaccgtcaccagattgctggccacggcaaagctggctatggatactgtccccagagaggaaaccagactctgaaggaatatcttgccgaactggaacatgccgttttccagcccgttgggaattccgatagacaggatgttctttatcatatgacggtccggaatcaggaacttccagctgttgagacggatggaattgttcctgctctgtatgaggacgaacatcataaaagcagccgtcacacggcttataagggtaggccacgccactccggccacgcccattttaagaccgaatacgcagattgcgtttcctataatgttgatcatattcatgacaaaggaggtcatcatggatacctttgagttgcccatggaacggaacagggccgcgcaggcattgtagagtccgatgaagggataggacagtgctgtgatccagaaataggtctgtgcattgtccatgacgtcctgttccacttttccaaatatgcctcccagcagctggggtccccctacaagagctgtgccggcaatgatgacagaaacaagcatggtcaccagaatcagctgtccggctgccttcctggcatccctgggctgctccttgcccaggtactgggccgatatgacggctcctccggtagccagagctcccatgatttgtatgattaagacgctgatggaatccaccagggaaacgccggacaccgcggattcccctaccgcggccaccatcaccacgtccaccattcccaccagcaccgccatgatttgttccacaataaggggcgccagaagctttatcatttgttttctggaaaacatatcttaccttcctctttctctcataattccaacaaattctcatcgttccaacaaattctcatcgttccagcaaattctcatcgttccagcaaattctcatcgttccagcaaattctcatcgttccagcaaattctcatcgttccagcaaatacccagccatgattcccggaggcctttcttcctctcagggctatggctgggtatctgttgccgcatatctgttgcgcatagttattgccgcatatttattgccgcatttcgtagctcccggaacccatggccctcatggaggtgctgtagaacctctttgcggcccgaatcagatagcaggtatccttgattcccgctgtctcgtacggggagtgcatggatagctggggcagtccgatgtccactgtattcagagccacatggctgttggaaatattgcccagagtggacccccctgccttgtcggaacggttggtaaatgcctggcagggtattccctcttcctggcacaccgccctgaacacggcggctgaaagtccgtccgtggcgtactttgtgctgtatttgatgacgattccctcattcatgtagggacggtttacggggtctgatttgtctccatggttggggtgggctgcgtgggcattgtcagcggaaaccatgaagctggaggcaatggccatcaggtactcctccccgctccttcccatggcgctgttaatccgtctcagcacatcctccaggaaggtggagtcagccccctgcttggtcaggctgcctatctcttcattgtcaaataccgcgtgaacgctcacacagtccggatggccgccctccagaaatcccttcaaggtggaaaacgcgcactgtaaatcgtctaaacggccgcaggacaggaactccccgctggccccccagatgcttcccggcacacggttgtagagatagagatcgtgtcccaggatatcctcccttttaacccctgcgctctcagcaacagtttccatgaaggttccctttgcgtccgctccgccgtataagggcagcatgtccacctgggcattatacttatatccgtcattgacctcgcggttaaaatgaatggccaggtttggtatcataagcaggtcccggtccacctttaccagctttgtggcaatgcggtttccctccttcacagccagacggcccgccacggaaaggggacggtcaaaccagggagcgcacagcataccgccgtatttctccacgttcagctttacatagtgattttctgcctccatctcaggattttccttgattttaaaagaaggagaatcgctgtggctggccataatctggaaactggaaaatgcttttcccggcaccttaaaggacacgatggatgaaccgttcctggtcacaaagtaggaaccgccctctgtgagctcccatttctcgccctcatgaagctgtgtgaagcccgcctcctcaagacagtccgcaatggactgtaccgcgtgaaagcaggtggggcttttttcaagaaaactgatgagttctttggctgtgcttaaacagtcttctctgtctatattcatatgacatctcctttgtctctttatttctcctctactgtaccataaacacacctccgcggcaatgcgggatgtttaactttttttctcctttgctgccatccatggcataatgaacccaagtcctaccagcacaaagggagttacgatattcagagccagctggaaggggtcatctgagtaaatgcctgtcaggcaagcgaaggccgtgaatgcaaaacaccagccgcccaccaggatacctgctgctttccccttcacaaacctgtactcgccgcagaacgcattcccggcccgttttaaggcaatatatgccacaaagacccacagataacgcaggggcatgcacaccgagtttaccttgaccagccagcgcaccagaacgtccacgttcctgatgccaaaggcagggaccacaatcagtacgcagacaatgagagtcaccagccggtgtccgttcacataggtgccatgttcatttttctcaaacatcctgctgggaatgaaacgggaatccgcgctgtctaagagcatcctgaggggcgcgtccacggacaggaccataacggaaaactgtccaatcagattggtcagcgcgtataccaccacgaaaaaattccccacatgataatattcgcccagcttctggaacgcgtagtaggcgccgttggtcatcaggtcctggggaatatggttggaatcaaacatcatgcccagggcaatggtgcccaggatggcggtcacagccaccatggctgccagggccaccatgccctttgcaaaatccccggaaggatccttcatcttatttacatagggggaaatcttctcacatcctcccaccgcgaaaaccaggatggaaaggctcaggaaaaagttggcgttaaagtccggtatgaaggatgagggggaccagtcaacggctaagaaggcaccgtctgtcagggccggagcagccaccatcatggcaatgaacagcatggacataatgaacatggcggaacctgccagcgtggcaagcctctttaacacccctatacccttgccggacaggtacatggcaaacaggaaaatgaccaggcacagaatctgcatcaccgtggtattcatgccgctggccctcttgtcctgaaacagggcccagctggctgcaattacagtggaatttggtttttgggagatatagggcatatggaccacccagtaggtccagcccgcgtagtaagccatcttaggccctatggtctcacgaatccaggagctgacaccgcctccggcatgcttgaaggtggagcccagctctcccaccatcagtgcatagggcacaaaataaatggcaaatataagaatccaggatacaatggcctttaatccgccgtactccgagaatccgtttatcacattcccaaatccccagactgttgaaaaggccatgaaagccagggtatgccagagaatcttcttatcatctttctgctgcatcacaatgtttctccttatctcattcagaatgtactgtctgtgacatttctgtccataccatacattctttccaaaatgagggaaagatatgagcatccagatagaatcatgccctggcttccttcagatgcctcactgcctcggacagcttcatgctgttggaccctttaaaaagaatgcagtcgccctccttaatgtgctcatccagccactcttctacctgggccaaacggtccatttcaatatggggcgtcactgcgcgggctgcatccattccgctgccaatgcaggatgccagctctccaagcaaaaggaccatgtccaggggatgttctcctatgtaggcgccgatttcctcatggaacctgacggcttccaggcccagctccttcatatcggctaagaccgcaatccttcgtccttctcccttcacgctggccagcacctccagtccggccttcatggacaccgggctggcattgtagctgtcgtcaatgacagtgacgccgccccactgaaatatctgctggcgtcccttatagcccttaaactgtcccagggcaagagccgccttctccatggaaagcccgtatgtatccgccactgccagggctgccatggcattgctcaccatgtggcttcccataacctggagacgcacccggacgcttctgtccccgtgaaccgccgtgaacacgggatagccttcttccaggtgcagatcctccgccctgtagtcacagtcccggcccagtccgtagagtaccctctttctgccctccttcggaaccactgaggccagaaggggatcgtcgccgtttaagaataatatgccctctgccggcatcccgtcctggatatgcagcttctcctccagaatgtgttcctgggagcccagctgttcaatgtgggccacccctatgttggtcatgacggcacagtccaccctggcaaccctggcaatgcgctccatctctcccggttcgctcattcccagctcaatgacgccaatctcagcagactgcgggatctccgctatggtaatgggcactcccacctggctgttgctgttgcccggagtcttatacaccaggaatccggcgctcagggcctccgctatcatttccctggtagtggtctttcccacgcttcccgtgattcccaccagcggcagggtaaggcgtttcctgcaaaagcttcccaggtcctgaagggcctttttcgtgtcaggcacctcaatccacgcggccccaagggctttcttctcctgctccctgtttcccccgcactgttgccggacagaggctttaacatcctcccagcagtgatgttcactggtaaatactgccgcggccccgctggcaattgcttggcagagaaagcggtgggcgtccacccgttcacccacaatgggtacaaacaggtcatccccctccatttttctggaatccaggctgatgtgtcccgcatgctgatcctcctgccccagcagaaggtttcctcctgtcgcctcaagcagttccttaaccgttattcctgtcatactgtatctcgtctcccaactcttttatggtttcttcaatgacttccctgtccaggaagtgatggcgcacaccgttgatttcctgataatcctcgtgtcctttgccgatgacagctatcatatcccccggcttggcgtgaaggatactgtggcggattgcgtcccttctgtcaggaatctcaaggaaggccccgcctgttttctcgatacttccccggatatccgccatgatgtcctccaccttttcatacctggagttgtctgccgtgatgatgctcagatcggccagtcttcctccgatttcgcccatggtgtagcgtctgtccttggaacggtttccgccgcatccaaatacaaccaccaggcgtttgggatgatactggcgcagagtggtaagaaggctctccatgctcaccgcgttatgggcatagtccaccaggaccgtgcacctggatgaggtgtggacgatttccatgcgtccattgacacgtatgtgctccagggcgtggacaatcctctcttttggaagtcccagaaaggagcatacgcacagggctgccagggcattgtccacgttaaacaggccggggattcccaggcggacgtccatgtccagttttcctgcgacgtcaaactctgtgcccacaaagtccggccgggacacataccggatattggacgcctcaaagtcagctttcgtctccctgtcttcctttacgcggtacgtatagagcctgcaggacgcatccttcacgatttctttaaaatgcccgtcatttaagttcaccagccctatcctgcacatattcaaaaggcgcgatttgcagtaaagatattccgcaaaatcagcgtgctcatccggtcctatgtggtccggggatatattggtaaaaatgccgtagtcaaaggagatgccgtccacccggtgcatcttgattccctgggacgacacctccataatcatatactggcagcctgcctccgccattttcgcgaaggactggtgcagttcataggattccggcgtggtattcatggttggggtcacctggccattgatcaccgtgcctgtggtgcctatcatccccaccttttttcccgccgcctcaagaatggcttttatcatatgggtggtggtggtttttccctttgttcccgtgacgccaatggtgatcattcctgtcgcaggatagccgaacctggctgccgagagaagagccaggcttttcctgccctccgctgttttaagtattgtcacccggcccatctcatcctccgtaagtcctgaggcagccagctcctcctcaacgtcccgctccgtcacaagcacgcggacgcctgcgcgcagcacatcgggaacaaaacagtgggaatccacgcgggtccccgccatacacacaaacacagcgccgggcactgcctttctggagtcatagaccacctctgtgacctccgcatccaggcttcccctgacaagttcataatccagctcatttaaccaggttctaagtatcatctgaatacctcatttctttttcgtgcatctcatattatgcctaaatatatcctggcccggcgctcctttcctggatgcgccgggccaggcccatttcttagaagagtccggtaatcttaccgttcccgtccacatcaatgctgtctgccgccggtttcttgggaagccccggcatggtcatgatggaacctgtaagcgccaccacgaagcctgcgcccgccgatacataggcgtctcttacattgatggtaaagccggagggccttcctaacttggtctggtcatccgacagtgaatactgggtcttggccatacacaccggcaggtttccaaagcccatatcctcaatgcgctttaatgccttggcagcggccggtgcaaaggatgcgccgtctgccccgtaaatctctctggcaatggtgttaatcttatccttaaggctcatctcatccggatagagcacatggtactgggttggcttgttctccagtgtatccattatcttttcagccagggcaatgccgccctcgccgccctttgcccacacctcggacagagcgaattcacagcccctgtcctcgcagaacttcctgatataagcatattccgcttcggtgtccgatatgaaggaattgagtgtaaccaccacgggtacgccgaacttctggaggttctcaatgtgcttctccagattgacaatgcccttctcaagggcttccggattctcggctgacagctggtccttcggcactccgccgttgtacttaagggcccttaccgtagccaccagaaccactgcgtccggcttcagtcccgccttgcggcacttgatgtcaaggaacttctcagctcccaggtcagcgccgaagccggcctctgtcaccaccacgtcagccagcttcagggctgtcttagtggcccttacgctgttgcatccatgggcaatgttggcaaacgggccgccgtgtaccagagcgcctgtgtgctccagggtctgaatcaggttgggctttaaggcatccttcagaagggctgccatggagcctaccgcatggagctgctcagcggtcaccggctctcccgcaaaattataggccacgataatcttgcccagacggttctttaagtcctccatgttgtctgccaggcacaggatcgccatgatttcggatgccactgtaatgacaaagtggtcctccctgaccataccgtctccctttgcgcccaggcctaccacgatgttgcgcaggacgcggtcattcatgtccacgcagcgcttccactggatctgccttgggtcaatacccagggcgtttccctgctggatatggttgtctaagagcgctgccaacaggttattggcggatgtgatggcatggaaatcacctgtaaagtgcaggtttaaatcctccatgggcacaacctgggcataaccgccgccggctgctccgcccttaaccccaaagcaggggcccagggacggctccctgagtgctatgatggcctttttgcccatctttccgaatgcctcgcccagaccaaccgtggtagtggtctttccttctcctgccggtgtcgggttaatggctgttaccagcaccatttttccgtcgggacggtcctttacctgctcccagagttcgtctgtcagctttgctttatacttaccgtaaagctccaggtcatcctccccgattccataagcagcagccacttccttgatgggccgcatcacggcctcctgtgcaatctcaatatctgatttcatgatttgttcctcctcttatattacgctttgcggctttctgccccgcaggtccgccaacgttttattcaaaagcaccggccgctgccgcccatgccggcagccgctgctcttgtttccccatacattcctgtttccccggtccggttcacctgcaccgcgttcccgggaaccaggtttaatccccctgctccagcagttcctcgaattcttccatgctcataagcacttttctgggcttggtaccttcttcctcgcccactacccccgcttccgccagctggtccataatacgggcagcccggttgaagccaatcttaaacattctctggagcattccgatggatgccttttccttttcaataataaatctgcctgcctggacaaagtattcatcccgctcagaagccccgccgcctccgtccgcggacggggatgagacacggctttccacttccggattatattccgccaccatgccctgttctgtcaaaaactccaccacgcggcccacttcctcatcggacacaaaggcgccctgcacgcgctggggtttggggaatcctgccggataaaagagcatgtcgccctttcccagcagcttctcagccccgttcatatcaatgatggtcctggaatccacacctgatgacacggcaaaggcaatcctggacggcacattggccttaatcagtcctgtgatgacattgaccgacggcctctgggtggcaatgaccagatggattcccgccgcacgggccagctgggccaggcggcagatggcgtcctccacctctcccggagccaccatcataaggtctgccagctcgtcgatgataatgacaatctgaggcatctttgccggcttcttgtcatcctcaacgtccttaattttttcaactctttcattgtagccctttaaatccctgacattgcactccgcgaacttcttatagcggtccgtcatctcggccacagcccagttaagagctccggaagccttcttgggatctgtcaccacagggatgagcagatggggaattccattatagacactgagctccaccaccttggggtccaccataatcatcttcacgtcctctggtttggacttgaaaatgatgctcataatcagggtgttgatacacaccgacttaccggaaccggtggcgcccgcaatgagcagatggggcatctttccgatatccgtcaccaccacctggccgccgatatccttgcccacggcaaaggccagacgtgacttgtggttcttaaatgactccgcctccagcaaatccctcaggtataccatattattctctttgttgggcacctcgattcccaccgccgacttaccgggaatgggcgcttcgatgcggatatccgccgcagccaggctcagcttgatgtcatcggtcagtcccactatcttgctgaccttcacgccctgttccggcaaaagctcataccgggtcacggcagggccgcagctgatatttgtaaccgtcacccctaccccaaagttatggagggtctgctgcagcttaatggccgtggccttatactcatcccctgagaaggaaccggcattcttagcccccctcttaagcagagtggtgggcgggaacacatattccttctttaccgcctcttccttttccttaatttcctgggccacggccatattggtatccggctgtttggcctcctcccgcttcttctcaatcttcttctggagaagttctgtctcggtctctatgaccttgcctgatgccgtaaccacccgcttgggctcctccggcacaaatacgctgtcataattgataccctgctccgacctgtctgtctcgtagatatctgtttcccggccatccgcttcaggaattcccgcttcgcgaattcctgcttcagaaacttccgtctcacggcccggggcttcgggccgtcctgacccataaacgccggcgccttcagaagatatggcatccccgtccccggcggacctgacatcaaactccatctcctccagggtctttaaatcctttttcacatggatggtgtcataatcatccccgtcgtgtgtcccatactcgtcctccacccggatgccggtgaccacaggagcttcactccggtgtccggtacggctgtggccctctatggatctggccagcgctcccagctcatccgtgtcataggaatccccgtcatccccttcagactccagaggcgggtcaaacctgcccacaaactcatccggcggcaggacttcctttgcgccggctgtctgggccggtccccagtcctccccatatgtatcaggcatatccggcatttcttccagatccgctccaaactcgcggtcaaatgcctcctcgtcgtactcctcatcctcaggcgtcatcagcctggttgcattcaggttaacgccccgcactctctgttcctctcgaatgcgtctgcgttcctcctcccgtatggcatgcagctccctgcggcggtccatatcttccctggcatactgataggccttgtcccctccccgcttcacagcggacacaaaggaacgctccgtgatacataccatacagatgatgaacaggacaaccagaaccagaaaggttccgggcttccccaatccgatggtaaggaaggaggtaaggacgccccccagccatccgccgcccgtaccggtcagggtggactgcttataatactccatccacttggcgccggccggaaccgtaccgaaagccagctgcagcagcccgcataccgtaatcacagccccggccacggctgccagcttcatggcggcatgaatgtttccctggttggacagatgaaaacaggtacccacgaatatcagaataggaaatatatatcccactattccaaatatccccagctgtaccccccgcagcacatcgcccaccacgccgcacagcttgaaattgctcagaaataaaagaatggcaacagcaaaagagcagatgatgaccacttctgctctcataaattccgtattatcctgttcataggcctttttcccagttgtcctccggctcttggaggaagtgcctgtcttcttggacgtgcttccctttggccttcccggttttctgttcccactctgctgtcgtttcgttgtttcagccacttgatacagcctcctgtcattctcttgcaagttatcataccgtatcagcctcccattcccacagcaggctgtctcatttatacagttaacttatattatgctatatttgaggttaaaattcaagtggattgttccaaaagacggaatcttaagacggaatctaccgcctgcgttcccgctcatcaatcatggcatagagctttcccagcgcttccttgatgccccccacctggttgatgagccctgcctccacggcctgggtccccactaggacagtgcccaggtccctggtgagcatctttgtattatgcatcagctccctcagctggtcataggcaatatcggcatgatttgatacaaacgtcagtatgcggtcctgtatcatctcaaaatactcgtaggtctgggacgtacctatgaccatccctgtcatccgcaccggatgaatcatcatggtgcctgacggcacgataaaggaataattggtggacacggccaggggaaccccgatggaatggcttccgcccaataccagggatacggtgggaaggctgagggacgcaatcatttccgcaatggcaagacccgcgtccacgtcccctccggacgtgttgagcagcaccagaagtccgtccacactgtcgtcgtcctctatttcggccagcttcggcagtatatggtcgtatttcgtagtcttgctgcttcccgaggaattctcgtgtccctccacctccccaatgatggtgatgagatggattttcctctgtttgcggttgtcctccaaaatgacctggccatactcctccagcttattgtcttccttctcctctatttccttctcaagcttcttagcctcatcgtcctgctggcgtacctgtccgtttccgttttccacctgattgtctctttttttcctgtttttttttccttgtcccataatcagaccaccctttcgtgaacattcatcaattaaggatagtctgtaccgcgaaccataaaatatgcgctgcctttcacagagttttacacaaaaactgccggccagcagagactgctgaccggctttctgaataaaatacaatatttttgatctagtcgcccaatacatttctgatagccacaggcgacctgtaattccaggtggaaatcttgataccgctcttacggctggctgcatggactacctggccgttgccgatgtagatggctacatggtttacctggccgccgctgcccgcatagaatatcaaatcgcccgggcgcatgttgcctgaggtcaccgccttgcccatcttggcctgggagccggaataatgaggcagggatacgccgaactgtctcatgacctgcatggtaaatccggaacagtccacgccctttgtcaggctggttcctccccatacatacgggttgcccacatactgaagggcgtaattcaccaccttggaacgcctggacgccgcattgttggccgccgcctcggcaggtgagaacttgatggcctcgttcagtgcgtagcgcacctccacgttgttgtccctggtggaaataaacgccttatccaccttgcttgtgtcctcttcatccacagaatccaggtcaatctccacccagccgtctaactgcgccacaaccggataacgctcgtcctttacaatctgggtccaaatcttggcgtccgtgttgggctccgtgcgcacattcagcacgtctgtgttgataaccgccttaagagtggcgttctgcatggctatatcccttgcctcctggcctgtggccgtgtactgggggtctgctgagatataaccgatgatggggcctgacttaattttataccagccgtccagggtctccaggatctcgcctgccgccttgctggtcatctttccgataatcttgccgtctgactttggctcctggcgcacattcaggtagttgttcaccttggatatgaccagattgtcatactggttgatggccatggccttcatgtccattttacgtccttcgttcagggaataggccacctcggcatattcagaggaaatatatccctcctcaatctgaatccagccgtcctccaatcccttgaccacgtagcgctctccctttaaggcctgtccgatgacatttcccgggtccagggcaggtgcctggcggatgttcagattgtcagccgtcaccgtggcgcgcagtttgacaagctcctttgccttttccctggcttcatctccggtcagaagatactggttgctgatgtagccctccactccgccggaagtgatgtgggaccagtccccttctgttgccagaatctcacaggctccgtcccctgacagcttacctatgatcttgccgtcggtgctgggagtctcccttatgttgaggtagccggacacctgcacgattcccagattgctgtaggagctgattacattgtcaatctcctgggcttccttcagggccgcttccttctccggagaaacactggccggatccgcctgggccggggtggcgtttcgcacctgtcccgtgggtgccggtccggctgccttgccggataccggcttcttaactgcctttactcccagcacgatgattcccactgccgcgatgacagccagcaggagcacaaggtatctggggtccagccgttgattccgtttttttctggccttgttcaggctcgatagataatccttatgttcaagcatgattattataatctccaactcatttttcgccataaaagctcatatagcgtaaagtatatcataaaaacagactcgaaaatgtgaaaaatttcttaaattttgccggtccccgaagtatttacatgaaatgccccggaaaccggcaatgtcagcggctgatatggattactttgagagcagcatgcggtcattggcaaactgccctccgctggcctccgcaaacttggccagaaggtcatctacggtcaggttctgtttttcactgccggacacgtcatagataatacggccgtcattcatcatgataagccggtttcctatctggatggcgtccttcatgttatgggtcaccatgagggctgtgagattctgttccgtcaccatctcatttgtcaggtccagcacctttctggccgtctggggatccagggccgccgtgtgctcgtccagcaggagaagcttcggcttctgcagcgttgccatgagaagggtaagcgcctgtctctgtccgcctgagagcagtcccaccttactgctcatgcggttctggagtcccagtcccagtctggtcagcaggtcgtggtaatagtccttctcattggccctgatcccccagcccagccctcttctctgtccccttctgaaggccagtgccatgttttcctgtatttccatgccggctgccgttcccttcatgggatcctggaacacccggccaatgtatttggcccgcttgtattccggctgcctggatatattcactccgtcaatctcgatctttccggaatcaatgggatacaccccggctatcatgttgagcatggtggacttgcccgcgccgtttcctccgataaccgtcacaaaatccccgtcgttcagggtcaggtcaatgccgtttaacgccttcttctcattgatggtgcctttgttgaatgtcttgcgcacattggtcaaaatcagcattatgcattccctccttccgagtattccttgtaggtcctccacttattggcagccaccggaatgcagagagccagggtaaccacaatggcggataaaagcttcatgtagtttggattcatgcccatcttgatgacaaaggcccggatgacaaagtaaatcacggaaccaatgaccgcagccgacagcttaagggcaaagttgcaaaaccagccaaagagcacttccccgatgactatggctgccaggccaatgacaatggctccggtgcccatctggatatccgcgtatttctggccctggcataccagggcgcctgacatgcccaccagaccattgctgagcatcagggccagcagcttggtccacttggtgttaacccccagggcgcgtatcatatcctcattatttcccgttgccctcagggcgcttcctatctccgttccgaagaaccaatacatcacagccaccataagtatggccgccgcgattcctatgacctgggacgcctgggcctggttaaagccggtggaggaagaaaccatggtcacaatggtcttggacttgagaaggggtatgttgctgcttcctcccataatccacaggttgatggaccacagggatatctgggtcagaattccggccagtatggacggtatctcaaatactgtgtgaaggatgcctgtcacaaaaccggccgccattcccgccagggtggctatggccagagccgccaccggattcattcccctgtccacaatcagcgtggcacagacgcagccccccagggcaaagcttccgtccacagtcaaatcagcaatgtccaggagcttgaaggtgatgtacacccccagcaccatgattccccagagcacgccctgtcccactgcatctaacagattggggcccatgccctgcatcagattcgccaaattcatatctatacttacctccgttcctgtctctgtccctttgtatcatttgattatgtaaatagcttgcccaaaccgccgttcccggaagccttacggcttgagcaaaccatctaccctctttgccggatgccaatttacccaatgactgaaaagagggtgctgcgggccaaagcggtttttaccgtctctgccccgcagcaccgcctgtatcatctgagccgcccgactgtttatcttgctccggatacatcaatcccaagagtctgggctgtctcctcgttcactgtcagctcgcacttctcagccggcaggtactcaatcggcatatcggccggtgacgctccctcggtgaggattttcacagcctgctggccggtcatgtatcccagctggtaataatcaattccgtatgtagccagtccgccgttctgtaccatgcctgcctctccgcagataaccggcagcttgttgtctcctgccaccattccgactgtggccatacctgccgcgattacattgtccgtaggagcatacaccgcatccaccgcgcctaccatggactgtaccacggtctggatctcattggagctggaaaccgtatattccttgctctgcatgcctgccgccgcaatggcttccttggccatgtccgcctgaatcttggagttggactccgcggagcagtacagcacgccaacggtcctggcatccggaaccagctgcttaagcaggtcaatctgctccttcacaggagtcagatcagaggttcctgtaacatttgctcccggcttttcattggtgttaaccagaccggattcagccgggtctgtcactgcggtaatcaggacaggcgtatcctccaccgcgcccaccatggcctgcgcagccggagtggcgatggccagaatcaaatccttcttctcgttggcgaacttggatgccactgtctgacatgcagactggtcgccggaagcattctgctggtcaacctcgtaaacgattccagcgtcgtctaaggcagcgatgaaaccgtcattggcagcgtccagagcggtgtgctgcaccagctggagtacgccaatcttataggtggttccctctgccttcgcggcagtctcaccctctgaggtctctccctcagttgtctcttccgcctttgcagccgtatcagccgcggtctccttctgtgcctcggtggcagctgccgtggtttcagccgtattgcctccgcaggcagtcatggacagaaccatgacgccggctaaaaccagggacatgatttttgatatctttttcataaaactatctcctctttccacttaagaattcgtcccctatcaggacttttcctatcatactacaaaaaaattgcgccgtcaattttattactttaaatttctgtgattttaaagtaataaagtgaaaaatcgctgttttttgcagttatttccgttattatttatgcatgtcaagaggaatagtgaccgtaaactccgtacctttgtccagttcggaggtcacatggatggttccatggtaaaagttcacgatgtgtttcacaatggacagccccagccccgtaccgccctgtttgcggctgcgtcccttatccacccggtagaaccgctcgaaaatgcggtccaggctctccttcgggattcccacgccgttgtcctttactcttaccagcatgtcatccccctgttcccccaccgtgatccacacctggcctccgggccggttgtacttaatggcattggtggccagattggtaaacagctccttcatctgctgcaggtttgcccggatgcataacggcttcacatccacatggagaaacacctggcaggaggctgccagaggctttaagctgtccatgatttcctggagaagcacgctgattctcacatcagagaacatcacctcggcatccatggactccaggcgggatatcatcagaatgtcattgataagcccggtcattccggcggcctccttcttgattcttctcgcgaaatccagtttcatgccgtcatcctgaatcatgccgctctccagcagctccgcgtagccctggatggaggtgatgggggttttaagctcatgggaggcgttgctgaagaattcctggcgtatctgcttttccttttctatctggcttaagtattcctttacatcctttgacatattcatgatagtctcggcgatgacgttgatttcaggatactggcagctttcaaactggagctccgtgtaatccccttttaccttcatcacggcttttgagatgtggcgcagaggtctggtgaccgatgacacaaaacgtctggtagtcaccacggagcaggccatagccataaggaagcttaagatggctgccggaaacagcatgggaaggtattcctgtatgccggaatagggtactgccagacggagcaccatatccgaataatccgatcggcaggccacatagagcatggtcttgcccagtgttttggaataacgcctggcatacccctccccgtgctccacagccgcccgtacctcctcacgtcccagatggttgtccagatactccgcgtccgcgtccgaatccgtcacaacggtaccgtccgaatttatgagggtcaccctgctggaatcccggtccgtaaacgcctccaggcgctccatctgctccattaagtccctgtcataatccaggatgctgtccacggccctgatggtgtaggtcatgtcatttttggaattttttaacatcattttgctgctggcaatataaaagatgacgctgttgatacacagcgccgccaaaagtaccaggataaatcgttccaataatgccttacgcataccttcctccttggtttcctgtcatgttatctcaccatacggtagcccacgccccgaaccgtcttaatacaggcaccgccctcttctcccagcttctggcgaagggtacggatgtgcatatcgagggttctggtctctccatcgtactcatatccccagatacggttgagcagttcatccctggtcaccaccctggactggttctccagcagataaaccagcagttcaaattccttcagtgtaagctccaccagccggccgccgcttgaaacctccctggtcttgcggttgacctggatatcctgataggacagcacatcccggttctcctcccgtttggtcctgcgaagcaggctgcggatacgggccgacagctccagcaccccaaagggctttaccatataatcgtctgccccgcagtccagcccaaccaccttgtcaagctccttttccttggcagtcaggagcatgatgggcacatattttaactgctccgtattccttacctccttgatggcctctgtcccgtccatccccggaagcatccagtcaaaaattaccaggtccggcttttcctcccgcatcctggccaggccttcctctgcggtctcaaacccttccgccgcatacccaaagccctccagtgcaatttttaacagattcctgatgttttcatcatcttctataatataaatccgctccattttccaactaccgcctttcccggcatacgcctatgtaaacagcataccaaacagaagtaaaatccgcctcatgggaatgtaaaatctgtgtaaagtttttccccttacaggatgtccttatacacccgcagcacatttttacagaatacagcctctatctccgaggcggtaaagccttcccgttccatggcgtccgccagcataggcagctttcccgcatcccccatctccaggtttccgctgattccgtcgaagtcagagcccagcccgatacagccgatgccgccgattttccgaatatgcttcatgtgctccaccatgtcggatatgcggcttaactgctcttcccccggtccgaaatcccgaaggaaggccgtgcagtaattgatgcccataacgccgcccctctctgccagggcgcgtatcatatcatctgtcaggttccttggatgggaggccatggcccttgcgttggaatggctggccacaaaaggttttctggtataccggaacacatcccatatgcctgcgtcattcagatgggaaatatcgattatcattcccaggcgctccatttccttcacaaaagcaatcccggtatccgtaagcccatgctccgtatccggcgccatcctgaaggtaccgtccgcctcttcaatcctggcattgggaaatgccagctcgttgggaaagttccaggtcagggtcatcatgcgcactcccagccggtacaaatcccgcaggaacgctgtttttccctggcaggtcccgccctcctccaccgtgagaagggccgacatcctgccctgctcccagtttctgcggatatcgtcgtaggttctgacgattcctatgatatcctcatgggcctccatctcctgataaaaggtgtccagaagttccatacagaattcaaagggtcttcccttggcctgttccagattgacatacagggcaaaattctgcagtccgtaatcccctgcctgcatcttcctcaaatccagcatcagccggttctcaaggatggactgcctgcctcccctctcatggtccttaaaaatttccgcaatggtatcacagtgcatatccacaaccttcatatccctgtcctctttcctgttctctggtattcccaatttattcccggataaccgaaattattctgtcactcagtactatgttccagtctatactgattgcctgtttctgtcaatcgacaggatttgccccggagagaatttctcctgcacggcagattgcgtcgtcgatgcggggcgctatgttttccctgcctatctccttgtcaaatcctgccttctccatcacagaaaggggctgttcgtttacatgggaaagaatcatggtgatgcgggccttgcggcaccttgcgttcagcttcttaaggctgttgagggcggttgcgtccatggcgggaacgcttctcatccgcagaatcagcaccttcttgtccgaatccaggggaatctgtccaatcttgtccgccgcgccaaagaacatgggaccgttcacctcaaacaccatgacctgcctgggcactggttttaagtcaatgcgctccccgtccgtgctctcctcgtaatcctctgcatatttccatccgtaaatatcagacacatccgccatgcgcttcatgaacagcagacaggccagggccagtcccacgccgattgccatgaccaggtcgaacacaactgtgaggaaaaaggtcagcaccagcactgccgtgtcgcttttgggcgctgtcctcaccacatccgcaaaggaccgccactcactcatattataagctaccataaacaggatggcggctatggcgggcatgggaatcagggcggcatacggcatgaggaataccaggatcagaagaagcaccgctgcatggaccatacctgccaccgggctgcgcccgccgttctttatgttggcagccgtccttgcgatggcgcctgtggccggaatgcctccgaaaagcgctgatgccgcgtttcccactccctgggccaccagctccatgttggagttgtgctttccgcctatcatgccgtcagccaccacacaggaaagcagggactcaatggcagccagcacggctatggtaatggcgtccggcatcaccctctgcaccatgctgaagctgatggacggcaggcggaatgcgggaaggccggaggatatggtatacaaatcccctatggtattgaccttcagatccagagcctttaccagcaccgctgccgccacaacggcaattaaagacgggggcacctttttaaagaatccgggccacagaattagaatggccagtgacacggctcccaccgccaaggcctgaagattcagggtatttatgcaggagataacctgccccagcttctccatggtttccaccggcgcttccatgaaggtgagccccaggaaatccttaatctggccgatgaaaatagtcaccgcgataccggttgtaaagccggttgtaatggtatagggaatgaaccggatcaggctgcccaggcgcagaaagcccatgatgacaagaatgaggccggccaggacggtggctgtggccagtccctccattccgttctttatgacgattcccgccacaatggtggcaaaggctgcagtggggcctgctatctgcaccttgctgccgcctaagaaggaaatgacgaacccggctatgatggccgtataaagtccctgttccggtgtgaccccggaggccagggccagggctatggacaggggcagggctatgatggccacaatgattcccgataccacgtcctttgtgaattgttcctttgtgtactgtttcatggacagaaacagctggggtataagcgttttcatctcaactttatccttttcgtgtttataaaatgttaatacttttttactatagcgaaaggatggcttcatatcaattgttttccgccatgtttccaatataatacaaaaaaacagccgcccgtgtcagatccggcggttgtctgttcaggtatagggcctttccggcatgatgtccggccggcacgtatcactcgcttctcagggcgtctatgggatttaagttggccgcccggctggccggcatatatccgaacagcaatccgattccaacggacacgctgaaggatatgatgacggccgacagggcgggggtggcagacacgcccaccgcggcccccgccacagtggtggcaacacaccccaccaggattccgatgacgccgcccatggaactggtcaccgcggcctcaatgacaaactgccgcatgatggttctcttatccgctcccagggacttccttattcctatttcccttgttctctccgtcacagataccagcatgatattcatgacactcacaccggcaaccagcagggagattcctgctattcctcccagcatgccgctcatcatggcaatctgttcgttcagggaatccagcatctcgctcatggccgtcacacggtataaatcctcatccttaaatgtttcgtacaggaaattcttgatgactgtggtgcactcgtccgccttgctggtatccagggccgtgaaggtgtagttgttgatgttggcgtttctggacattttcacggctacgctgtaaggaatccacacaaagtcatcggttcccccgtcctccatgttatcctcgtcctgggccttagccacacctattattttgaaggcatagccgtctatcttaagggtctgctctatggcgttttgggcgcttccgtaaagctcattggccacgtaggcgcctatgacgcacaccttctggcgtgagacaatatccgaatacgcgatgttccttcccgtttccagttcataagacttgatttccagatactgttcactgcgccctgccactgaggtggatgtcatggagtcatccccgtatttgatggtggaggacaatgccacattggggctcagttctccgaacaggtctgtatgttcctcataaaacgcgtacatctggtccacatccagggaacgggaggccaggttggtcacatttacattgatctggttcacccccatgctggcgaagctctccaccacgctgcccatgtacccgttgaccaggctaaccagtatgatgactgcggcaacgccgataataattcccagcatggtcagaaatgaacgcatcttgttgccccaaatgcttttcagggccagcttaaatgattgcagcatagtcttttacatctccgtcaaaattaatctgcccgtcctttatcctgaccacacgcctggcttccatggcaatggtgttgtcatgggtaatcatcacgatggtgtttccctccccgttgagctgtttgagaaatcccagcacatcccggctggtcttggaatccagggctcctgtaggttcgtctgccaatatcagcgagggacttccggccagggccctggcaatggataccctctgctgctgtccgccggagagctggtttggcatgttcctccatttttccgacaggcctaccttttccagggaagccacggcccgttcccggcgctctgcatttcctaccccggcgtacagaaggggcagttccacattttccagtatgttaagcttgggcagcaaattgtactgctggaaaatgaaaccaatcattttattgcggatgcgggccagctgtttgtcatccatgactcccacatcctctcctcccaggagatattcgccgtccgtgggcacatccagggctcctatgatgttcatgagggtggatttgccgcttcccgacttgcctacgatggccacaaactcccccctgtctatcttcaggttgatgtcgtcgttggcccgcacttcttcccctcccagatagtatatcttgtggatatgtctcagctcaataagagcttccctctgactggtattgtccatgtgttcctgattcctctctgtcttacttctggttccttcaggtcattctttagcggttttgccggccgccttcggacccgccgcggtttccgcctcccatgtttccgcctcctcctggaggaccgcccatgccgccgtccatcatcatgacgctgctgctgtttttgctggattcagccacgtaaaccacgtctccctccgacaggccgcttttgatttccacgaatgtgtcgcttgtcagcccggtctccaccttcacggcccggaatccggcgggcaccggtccctgctgctccgtcactgtgtcatccttcacatagacctggtttcctctcatcagggcgtccgccgggatggccagcacatcattcgcttcctccagcgtaatgactccgtccacattcatgccgggcagcaaatcacccatatcatccagggtaacggtcaccggataggtgctgaccccgttggagtatgtgctctccaggctgacgttggtcactgttcctgagaatgtctgtccctcaaaggcgtcggctgagacctccaccttctgtcccacctttactttcttaatatccagctcgtcgatggacatctcaaatgtcaggctggacaaatcgtatatggtggccagaaccgtggtgctggagctgtttttggtgatattgtctcccaccttgaaattctttgtgatgacctgaccggaaatcggcgcctttatggtgtaattatcgtagctgtcctgggtgctgtccagcttgttctgggctgattccacgctttcctccgccttgtccagggcatccttatagctctgaaccagcttatccgctgatttgtctgtcatcttaaaaacaggggttccttttgtaacataatctcctacatttaccagcagggattccacctccacactggtggacaggtccgcattcatggcggtatccaccgatgcctcgaacactccgtcctcactgcctatgaattccccgatctgaaccgtggcctttaaggatgtggtcaggccgccggggttgggcacctgtatggtgactacccgcaccagccgtccgcccgtgaggacggtttcctggtttgccactgccttgaccgttcctgccacctgctctcctgtatccgtcagggtgactgccgccggcatgccggctcctatgacggctgcctccccggacaaaaagggaattcttatttccataatatcatcgctgtacacatcggccagcttggtatttccgctcaccttatccccgacgctgatatacagttcctttatatatcctgtatcggtggctttatatgtgtttccgctgtagtcgctcagggcgtcattatagtcttccagggcgtcctcataggaggactgggacctggtcagggaattcactgagctggtcagctgggactccatgccggacttatcaatttcatagagcacctggtccttctccacctggtccccctcctcaaagcccgctgacaatacctctccctccaccatggaggtgatgctgtaggtgtcctttgccttaagggtgcctgatgaggacagctccgaggaaatgtccctgcgctccgccgatgccgtattatgggactgtgcccgggcagcggctgcctttgccttcatccccctccaggtcatggccacggctgcggctgctcctataatcagcaggaataccacgggttttacccatttcttccctccgtttctgccttttcctgcctgtgccggggcgccgggtgctgtttccctcttatgtttgccagggaagggcattaaaaagcgcagggcatctttctttttttcttccataccgcacctcacccttaatattctatggcgtcaactgccgtatagctgctgccgctcttattgcataccattaccacctcgtcccctacctctatgccgccatagatggaaaacaggtattgaagctccgaagaattcaggctgatggtgagatatccgtcctcgtcaattccatcctctccaaaatcgccatccgaattatcgtcatcaatctccagacggatggaagtgggcgtcataacgtccgtggatttatagtagatgttcttgacctcgccctttaacagcacataggcgttgttgccctccagatcatcgtcgtcccatcccctggtggtgtaagcccagatggttttggacttcacattatagtagacaacggcaaagcccgcatcctgctgggatgccttcactgcttccagtgtgctggctgttccgtttaaaaacacattggcattttccgagccaaagggcacggactggattacgctgaagcccttgcgcaccagtattgggcccttgcgctcgtcatccagaatggtgatgggattgatttccccgtcggagttaagctcacagtccagaacagctccatatatctcgctgctgtcctttttctttgtctttaacagattgtagaatatgttcatacagtctgtctggttcagcacctcctccggctggcggttcacttcctcattcagctccagataattgaactttgaaatgcgtgaggacgccagatccccggtaaagtcctcatccgaatagcccaacatggccagcgccgccttcaccgcgtccttatatgttatgtactcctcaggtttaaacagtcctccaagaaaaccggtcatccacccctgggatgccgctatgcggatatagatggcatccggatgggtgcttggcacatccgcgaacacggatacgctggatgtgggcaggttttccctgtaactggaggcattcaccagcattctggcaaaatcccctctggtcacctgtcctgtgtaatccgacacattcaggattccggtcaggttcaccacctgtctcctcatatcaaagtttgcggataatgtattggccataacggtcataggcaaagccgaggtcactgcagtaacggctgccagggaaccgcatacataacggcaggctgcacatggtcttttcattgcttttgctcctctcaaatcaatgggtattatcctttatttttttaccttatcacagtaatgtgttcattttgtgataagcacgcaaaataagcgcaaaaaaatgcctgtgaatacaggaatgtgttccggattttcacaggcatatttttttcattttccattacatcaaaggagcaatgaggcgcatgagacgtcccagcttttttcccatccagctgtaatttttacagtcctccatagtgataagactgcatttcttaagagtttcctcaaaatcatgctccacgtcatagaccaccgaattgcggtaaatgtaggccgcgcattcaaaatgcaggtacaggcttcggaaatccagattaatggttcccaccacagccttttcgtcgtcgctgacaaataccttggcatggacaaagcccggcgtgtattcgtagattttcacgcctgcccttgtcagctccggataaaaggttctggccagcatgtaggcatattttttgtccggaatgtgcggcatgataagcttaacatcaatcccgcgcttggcggcataactcagggcattgaccatctcgtcgtccagaatcagatagggcgtcattatatggacgtagtttctggcctggttcagtatatccagatatacacgctcccccacctgctccctgtccatagggctgtcaccatagggcaggatgaaaccggaatagtccgcggccaggggatgctcatagtctttggggaccgcgtacttcccatagtcctccggctgcctctccgtcacattccacatttgcagaaacatcatggtaaagctctgtaccgcgtctcccttcagcataatggccgtatccttccagtggccaaagcgcaccttgcggttgatatactcgtccgccaggttcacacctccggtaaaggccgtatggccgtcaatgaccacaatcttcctgtggtccctgttattctgataggtggacagggtgggcctgacaggcgaaaacatcttacagcgaattcctttttttcccaacactctgggataatggtacggaagaagcatgagacagcacatgccgtcatacataaccctgacttccacgccctccttcaccttctcctccagcaccttcaggatactgtcccacatatatccccgctccacgataaaatattccatgaaaatgaaatgccgggccgccttaagctctctcatgagagcctcaaacttgtcctcccccagcgggaaatattccacatgggtgttgccgtaggccggataacccgcatggtccttcatgtaatctatcaggtggctgcttctcctgctggcttccctgattcgctcctgtacctcctcgtcctgcttgagatagggggccgtgtcgcctatgtttttcttcagacgccgggccagaagctttgtctggaactgcatctgcacaaatatgtacaagaggacgccgaacaccggaatcaccaggaccggcacaatccaggccatcttaaagctggaattgatgggttcattgaaaatataaatgatgacaaccgcgctcaaaaggatagatatggcgtatacaatgtgcatgtactcttccagccaccggaaggcgccaaacaggattcccacctgtatggccatgaacagcaccacaaaggccgtccttccaaatataatccgaaataatcccctcattttcttcatcctgtcccttgtctcctctcatgtgacgcatcatgcagctcaaaagtccctggtgaaaaaccgtcatccgccgacctgattcaccagggtttattctctgtctttatgtggctgttacagtctttggggtgccagtgaagattttgctgtccaaatccgcaatggtcactttctctaaatacgcctggcagcactggttcagctctccgtagagctcgtccatgattcccgccatgcctgacgatatgagacaggccatgtgcgggttgccgctcttccatgaggcggccacaaagggggtatccagagcctcagccaccatggacaggttcacgtccctgctgtcacggtggaacagataaccgccgtccacaccttcctttgttttcacaagatccgcctttttaagctttgccatgaccttccgtatcctggcggcattggtacagacattcgctgcaagaccttcgctggaaaacacagctcccttgtgattcaaaaaaaccagcgcatgcaccgcaatggtaaattcacttgtcactttttcgattcccctttcctacctgtaacagcctgctgctgtctttcattaaatcataccattttttcctgaaaaatgcacttattttttaatatcataatctttcataatccaaatcatgaatcaaacggcataatgacctcccctgctgccccgtagtcttgccgccgccgtttcccggctctttgcttccctggacggatgactgggtctgaacctttaccgtgtattttaccacattgccatgggtcttaaagaattccagcaggctggtggtgaaaagtcccaccgcgaggaacggcagtacaaatcccagggtatagaccccaatcagaccaaaggccaatgcctttgtgctggcagacgctgccatgagcaggacactggcaagagccggtcccacacagggcgtccagggagcacggaacggaggcggcaaatatgctgttcacagaattcaatatggaagatgcattggaagtgcgttatgaggaaggaaaaacagagacccgctaagcaggccctgattcatgccgcattgaatcatttgtaaataatacaaaaggagccggtccgcttacatcaatctttatcgtaagcgggaggctccttttttcaatctcttaatcttctaacgcctggcgtatatcctcaataatgtcaccggcagactccagtcctacgctgaaacgaaccatggacgggtccacgcctgcctccaccagctgttcgtccgtgagctgacggtgggtatggctggccggatgaagtacggctgtcctggaatcagccacatgggtttcaatggagcacagtttcagcttatccatgaacacggaagcagcctgacgcccgccctttaaaccaaaggaaataacgccgcaggtacccttcggcatgtatttttgagccagctcataatacgtatcccctggaagtcccggatatttcacccaggccacatcctccctggactgaaggtaggaggccaccttaaaggcactctcacagtgtctcggcacccttaaatgaagggtctccaggccaatattaatcaggaacgcattctggggggactggatggagcctaaatccctcataagctgggccgtggccttctggatataagccagcttaccaaacttctgggtatacacaatgccgtgatatgactcatcaggctctgtcagacccttaaatttgtcatgctgggcctcccagtcaaagtttccgctgtccacgatacatccgcctaccgtggccgcgtggccgtccatatactttgtagtactgtgtgtcacaatatctgcgccccactcaaagggacggcagttaatgggggtggcaaaggtattatccacaatcagaggaacaccgtggccgtgggccaggcgggcaaacttctcaaaatccagcactgtcagggcaggattggcaatgctctccgcaaataccgctttggtatttggcctgaatgcctttgccagttcctcctcgtccgcatccggattcaccagcgtgcactccactcccatcttgggaaaggtaacggtaaacagattggtggaaccgccgtatatggtggaggaactgattacatgatctcctgcctggcagatattcaaaacagcataaaaggtagccgcctgtccggaggaggtgagcatggcccccacgccgccctccagctggcagatctttgatgccactgcgtcattggtcgggttcgccagcctggtataaaaataaccgctctcctccaggtcaaaaagccgtcccatctgctcactggaagtgtatttaaaggtagtgctctgatatatgggcagctgtctgggctcgccgttcttcggctcccatcctccctgtatgcagattgtgtctaatgattgtttgctcatgtttcccgtgtcctccttatggtcaggttctaaatggtgatgagattatattccttgttgccaaggcccagcttcacagcatggtcaatacaggtctcccagttggtatccggatgtgtattgatgaaatggtcatggctgtgatgctcctgctctgacagaaagcttccggcaagcacgggctggcggtttaccgcatccacgcaggccatgtccagggctaccgggtcaaatgaggcaaacatacccacgttaggcacaatgggggcgtcattctccgaatggcagtcacagttgggggacacgtccaccacaaggctcacatggaaattaggacgatccttcagcactgccagggtatactcggcaatcttccgattcaggatatcattggcctcgtcgtacatggagtccaccgcatccacgggacaggcaccgatacagcggccgcatcccacacacttgtttgtatcaatagaggctttccgttcaagaaccgtgatggcgccgtgggcgcagtttctctgacaggcgccgcaaccaacacacttatccgtatgtacaaacggcttgccggcattgtgcatctccatcttgccggccctggagccgctgcccatgcccaggttcttaagggcaccgccaaaaccggttgcctcgtgtcccttaaagtgagtcagggaaatgatgatgtccgcatccataatggcccggccaatctttgcctccttcacatactctccgtcaataggcaccagggcttcatccgttcccttaaggccatcggcaatcatgatatggcatcccgtggtaaagggattatagccattctcgtaagcagcgtccagatggtccaacgcatttttcctccgccccacatagagggtattgcagtcggtcaggaataccttaccgccttgggtccggattaaatccaccaggaccttggagtagttggcgcgcagataagccaggtttccgggttcgccaaagtgaatcttgattgcagtgtatttgttgttaaagtcaatatccatcatgccggccttttttaccagcctctccagcttctgcaggagattttccgtaagtgtagtcctcatgttggtgtagtatacgtttgatactgccatgatgtcctccttctaatttttatcctgtttattatacttcaaaccctgcatttattcaatcctgtatgtgcggacaacggcaccaaattttttttcgggagattttaccgcagaatttttagtacagatttcaccacggcgtcataaatcatccccacaacagaaaaagaccctgctgtaaagccaggccttctgtataattttatggtgccgtatcatggaaccggttaaattcctttcagcttctttcggtaaatcagataggaatacacacttggaatcaggaccattgccataaaaaccaggaagaacagggatgccagatgaaaaaatcccataatcagcatcagtatgccccctgctgtccatacatagccggccatacggtgagtcctgttccagttatcctcatctgccagggtccacggaagcttgattcccatggtgtagttctgtctccatttgggcaggtaattgcctgccgccacgaacatcagtgcaatgggaatgcttaccatgcttcccacgttgatatccataccgattccggacaggacaatcacaaactggaccataaccgccagaaggaccacgaaccaccgtgtaatctccttcaattccctggaacggctgatgttttctcgtttggggtcaatccggtaaatcacatttaccatcactgccatgagaaacataaaggcaggtatgccaaatgccgccatgttacggcttgaataaccatttaccacattgtccgatccccagtgggtgggtacctgttccggcaggcggttatagaaacatacggaaacgataaatggcacaaaagccagaatccagtacaatacatcccatttggaaatcttcctgttattttttttcatgctttttgtcttcctccattaatgattgcagccaggaaagaacttcctggaatacagtggtattcagctcataataaatatatttgcctgatttccggtcctctataagccccgcctgcctgagtatgttcaggtgatgggaaatggttgctcccgttgtgtcaaaatgctccacaatctgtcccgcggtcatgcttctccgctttaacaggttgagtatctcgcggcgggtggggtcggacagggctttaaatgtatcaccgaaggacatggacggaatacctcctttcactttgcctgattttatgtgctttttatagtggacggtgcaaaccagccatgtaaactaactgtatgatccaactgcgaatccagtgctccttttatttagatgtttatctagatatctaaatgtattttccaaagctcccggcatatgtcaagaggtaggaatacatgatgccttacgggcaaatatcccgggcatatgtctttcctcccacataatccgcagccgcccggcatcctgcagatgctgctctctccacactgcttctccactgtttcaccgcttatttttccatttcaaccgccagcttcagattggccttctcatattcattaaacacgcctgagtcaaaggcatccgcgggatactcgcctgaataccaggtaaatgtactgaaaaagtcattccagaaatcattcttgaaaatgtatccgtggcgggcataaatctcattgcggaatacggctgtcaggtccggcctccagctaatctgctgcatttcctctatggaataatatctggcatcggaatcaaagacaggagcgtcatagtcaccagggacttctcccgcagggtatatgcctgtgccgccttcctcaacctcctttttgtaagccgatatgatgtaatgcagagcctctgccgtgggggacttggcattctccttatagacgccaagataatcccatatgatttcattggacagaaactgataccctgaggatacctttttcagggttacaatgctttccagattaaactggctgtatccgtctgaaagacaccgtatcctgtatatccctccatccacctcgccgccggggcagaagaagcttctcatgttggtatcaccgtgttcagaataataccggtcaaagggggccagatatatccattcaagccctgacttcatccggtcaagggacagccctgttttctctgtgaggaacccatccatctgctctgtactcagcctcaccaaatctgtgtagagttccggctgtccaacggttttcaggtacatatccctttcctcctccgtcatcggggactgttccaatcccgcgccggaataaaacacttcattcagatttatatattccgggctttggtagtcagacataagaaatccatagttgtcggtcctgttcagatattcctcaaagccgcgcagttcatcttccgtcaattgccgctttggttcattttccgctggccggcccgcgatattatccggtgtggtggagctttccggtgcgaaggagctttccggactgacgtaatcttcctgtgtgccggagctgtccaatgcgccggagttactacctgtatctgcgccgcatgccgccagccccagcatagcggacaggagcatcacagccagcacgcctctgtgccatctgggggtaattcgccgcttattaatcaatttcataagacatcgacctcctcactgcctgattctgcacatcaatcccgttcatcagacaaagcttctttctcgttttggtccagaatttggcctacctgccagaacatttcccgggcgctggtatacatttcattttgcggcaccctccttttctttgaattgatgggatgtggattgtgctctgaatggtgctttaaattataggatagcatattttgggcggggggacaatggggtggggtggaattttgggggaattttgggggaattttggggggaattttggggggaattttggggggaatttaataaaatgggtgggctgcctggccggaggccagggacgcttgggggtggggggctgggtacaggagggagcgggtccgccgggcggcagccctgggaacgccgaggcgttcccagggctgtggggcgttcgccccataaaaatatagccggaaagccccgggaaagagagcgagctctctttcccggggctttccggctatatttttgcccggctcattgctataacatttttttcatctcatccgctacaaactgtaccttggttcctactattacctgtacagatgtcttgcttggcctcatgactccggccacgcctgcggattttatctttttctcgtctactaatgtgtaatcttttatctctaatctcagtcttgtaatgcagttgtctaatgatactacgtttcctttgccgcctaatccttctaagacaatggcagctaccttggtgaaatcgtcgtttgctaatacggctgccatttctgcgtctaagtcttctttctcacgtcctggtgtgggaaggtcgaatttggtgatgacggcgcggaatactacgtagtagataattgcgaatacaacgccctgtactaacagcatgaacggctggttggccattggcagcctgcagctgaaaatgaagtccgtgacacccgcgctgaagcagaagcctgcggtccagtggaatgcggctgctaccgctacggagataccggtcagaacggcgtgtacaaggtacagtccgggagccaggaacatgaaggagaactccagaggctcggtaacgccggatacgaaggatgccactgctcctgcaatcaggatacctgccgcatactgcttcttctccggctttgctgtctggtacatcgcaaatgctgcagccggaaggccgaacatcattaccgggaagaaacctgcctggtacataccggtaacacccttgattccgccttctgcgaagccccagaatttgttgatatcggcaattcctgcaatgtcaaaccagaataccgcgttcagcgcgtgatgcagtccggttggaatcagaagacggtttgcaaatgcatagagacccgcgcctacaggacccagtcccatgatctgctcgccaacccatacaagggcattgaacagcatcggccatacaaagtacaggatggcggactctgcaaccataacgaaagatgtaacgatgggcacacagcgctttcctgagaagaaagcaagtgcggttggcagctgtgcgctgctgaacctgttgtaacaaatggacgctgtgataccggaaatgataccgataaacgcgttgtcaatcttggagaaagccagaggagcttcctctacattcatcatagtggcaacaactccgctgttaagtacggtggtaacagtcaggaatgcaaccagacctgcaaggcctgccgcaccgtgctggtcctttgataaaccgattgccacgcctactgcaaacagcatgggcagcttatcgattacggcactgccaatcttcaccagcgcaaaaccgattatctggacgataccggttacgtcgccgccctgcatggtggcaggacacatggcgtagccaatacccatcataatagctgcaaccggcagaacggcaacaggaagcatgatggccttacctagtttctgcaaatacttcatcataacataaatcccctttctttttttagagtctccttttacacttttcctgtaggagtactctgaattacattttgataaataatgtatttaatcctgttcccaggcttaaatcatggttactgttttccggttattttccggacctgcctgacaaaccataccaatgtatcaggcatcggcggccagaacagactccacttctttcatggcagcatcttcatcgggtccgtctatacggaaggtaacctcatctcctgccacggtattcatggccatgatgctcatgacatccttcccgtccgccctgcggtccccgcagatgatttccacggaggagcttacatgaagcatcctgaccataagcatggcggccggccttgcgtgaagccccatttcatcttttaagataaagctccgctctatcaactcatccccacctttgttccttacagtttgatgatggccgtctctcccgcctttacttccattccgttcctacattccatcttcgggaactggggcgtgttgcagataataaccggcgtagtcacatcgtaaccggcttccttaatcttgtctatttcaaagtccagaagaagatcgccctgctttaccttatcccccgcagccacatgagcctcaaagtactgccccttaagctgtaccgtgtccagaccgatgtggataatcagctccgcgccattgtctgtctgcatgctgatggcatgctttgtatcaaataccatggtcaccagtccgtctgcaggcgcaaccactctgccgtccgatggtatgactgctgttccttttcccagaatctcctggctgaaggtggggtcgcttacctggcccatgggaatggctgttccgctgaccggcgctgcgattatcttctcttccttttcttctcccccgaataacttcttaagtgatccaaacatccttactgctctcctttcatgtcccccaagggacctgccaaaataattatttagtcctgatacgtttaatatgcagggccaggtaagccacctcttcctctgttacctggtgcctgtactgcagcttgatgagcgcctgtattttttggctgcaggcatattcctccggatacagacggtcaatgacctcctggaattccaggttatccagattcatatgctccccggtaaatacccgctgggccagaaagcgcagatgagtgatgaacctctcatagctgagggactgctcatccagctctatactaaaatactccctgaccacctccaatacctgctgtatcagattggtgatcttaattgtatcacccataggcgcatcatactccgcattgacaatgtgaagggcaatggaagctgcctcgtccaccgggagcttcactcccaggcccctttcaatcatggcaatggcatattcgccaatgagatattccgcgtggtaaaagctgcgcacctccctgattaaaggattggaaaacatcatcttctgtttgtaccgctccagtgcaaagtttatatggtctgtaagagtgatatacacatttgggttaataggccggttaaggacctctttggcataactgatgatttctgctgaaatctgtacatgctccatgggaaggttcacaagcagctccttaaacttatccatggtgttctgactctccaggcggaatattttctccaccttctcctcgtcaatggtgctgccttcctttgctttaaaaccaacgcctcttcccatgacgatgatttccctgccttcttcatcgcaggtacttactacattattattaattattttcgctattttcataattgctcctgataaaaacaaaaaaaccaactttgttaaagagacccgtgtgcgtatacgcacgggtacacactatccccttaacaaacttggttttgcctgccgaacagtaacaatccttattaattatttaattataacttccaaagatttacttcactaacagcatcatagcaaatcttaagataaaagtcaacaatattttatataatttttatatttgcccccactcctgttgtgagatttcccgacacatcccttgtcaggacttgatgtacatgtaaataatacccgtaaccgccagataaaaccaggtggccggattggaaaaccaggtggtgaaaaatgacagcatcatgtacatggcaatctgggcatagatcacatggcctgccggacatgacatcttccgcctgcgttttaccagaaagtagcatgctgctcccaaaagcccgcccagaagcaccattccaaagatgccgaaatcatagtaggcatcgtagaacagggtaagggtggtcagctccttcttggtcacaaagagaggaaagctcaccagtaccgggaacaggaatttaagtccagtaagagcccacaccggaaaacacatgcgaagcccaaagctgtgggataccagctgctccaccaagcagttaaaattatcgtagttgttggcaatatacatatagggctgtgtgatgaatatgggcatatggctgttcttcatctcaaaaatgccgttcaggtattccacactgtggctgcgcataacagttaagaccagataggcgggaatcatgcaggccatcagtactcccacacagaccaggctgaaggtgccgctcatggaaataaaggtaaaggcggccatgcccactgccagaatcagctggaacctggacacgcacagcaccggcacggccagggacagcaccaccataagaactcccagccagaatccctgatccctggtcagtcctcttcccctgcgggatatcataaggctgtacaccacgaacagactgggcaccagcacacaggaaaccgtaaaatagtggactccgctgacatgaaaataggaataggcatggggtaccccgtaggaaaacagcggcacaaagcccagcttccacgcctcaaagaaaaaggcaaggaaggatatgaccaccagcgctgccatggagtgaaggaggcgctttgcctgcaagggggattcagccgaggcataaaaacggtatacggactgcatatccgccgcgctccagccgtcatatatcctgtgcagcacctcaaacacaatccagaaggtgaacaccgccagtcccaggcagacccatgtctgggtgctccaatccgtctgaaggcggctgagcttaaagcaggagattccctgccctcccacaaaaaagaggcagaaaagccccctcaggtgaatcaggttgcctgtctccctgtaatcctttatatacagccacagggccgctgtaattaaaaccagcccagacagcatataaaaatgctgccgggccaatatgaagcttatgatataacaaaccagataaactgccattaatccgtaaccttctccacaaaatctctcatgtattgttctatttccgccgcagtggcaaagctcatggccttgtcggcaactgcctgaagttcctctgcactgtactgggtgaccatcttcctggccttcagaatggcggacgcgctcatgctgaattcgttgagtccaaatgccagaagcagcggaatcatcattgggtcgcttgccgcttcgccgcacatgccgaccatgatgcctgcctcacggccgcaggcgatgatatgcttaatacttctgagcacagccgggttaaaggtggaatacagataggatacctttttattgcccctgtctaccgacatggtgtactgggtcaaatcattggtgccgatactgaagaaatccgcttcctttgcaaagatatctgcaatcagggaagcggcggctgtctccaccatgatgcccacctggatgtccttgttgtatgcaatgcccttttcatccagctccttcttgatttcctccacaagagccttcgcctgacggtactcttcaatgcatgttactaaaggaaccatgatacggatgttgccgaatgcgcttgcccttaaaagcgccctcagctgaggcttatacacatcctccctgcggtccaggcagaaacggattgcccggtagcccaggaatggattctcgtccttctccaggcccatgtacggaatctccttgtcgcctccgatatccagggtgcggatgatgaccggcttgccgttcatggcagcagccaccttcttatatgcctcgaactgttcttcctctgtaggcatggcatttctgtccataaacaaaaactcggtgcggaacagtccgatgccctctccgtcatactggagcaccttatctacgtcctcgggccttccgatgttggccacgatttccacctgtacgccgtcccttgtgacagaaggcttgccgatatactgctccagctccttcttttccaccaggaaccgctttctcttctcctcgtaatcagccgccacagcctggtcagggttcacatacacctccccggtgctgccgtccagtaccacctggtccccgtcctttacgccgtccataaagcctgtgacagccaccacagccggaatctccagggcccttgccaggattgcgctgtgggaggtcttgccgcccagctccgtgacaataccggtaaccttggccggattgattcccgctgtcatggacggggtcaggtcctttgccacgatgatgctgccttccggcagggaggagatgtccacggactggattcccataagcatctgctgcatacgggtcttgatgtcgcgcatgtccgtggctctctgctgcatcagttcgtctcccatggaggcaaacatatccgcatacatgttgcacacattctcaatggcatattcactgtttacgctgtcatttctgatagagttctcaatctcccctgtcagcatggggtctgccagaagcatcatatgtccctgcatgatttccgcttccttctcgcccaccctggttgccaggtcctctgccagcttctctgtggcctttatggtctcgtccagcgctcccttaaaacgctgcacctcctcttccacatcggtaaccgcctgcatggcaatcaccagccggatctcctccacaatcaccgcttttccaattccaattcctgcagaagcgcttgttcccttgtacctcatcttgtacctccttattaaaattcatttatactcacaacctttggttgccgtcaatctactcgcctaacccggcctccacgataccaaccatggcttccagtgcttccttctcatccggcccctcacagacgaattcgatttcgtctccagatttcacgcaagctccaaggacgcttaatacactcttggcattggccgtggtggtgcgcaccttgaaggatatttttgatttataacgcagtgcctccttgcagaggactcccgccggccgcaggtgcagaccggacggattcttgattacagttgttttgcttaccatgatacctctctccttgctttttgttactgaccggtctctgccttagacgcgctgacaggtccttctgatgtctcactttctgtcccctcctggccctcatccgtgctggccgttgtactgtcagccgacggtcctttttctgtcactgtcacctggatatggtcgtagctcaccagttcataggcatcgcccagctggaacttaatctccccgctgttctctcccggcaccatatcctccacatccatctcagcgcccaggacggcagccgaaagctggtccagatcttccttcagacctcttatgactacgttcacagaatccctgtcatactgatattcataatcgctgtgggctcccacccgcttaatctggctggtcttaagctcaaatgtcctgctctccaaagcttccaccttgatgacaaccctcacctctttggatgactcgtccgaaaggtaaactccctccggcagatactggctgatatcgagggtgacttccttatcccctgtggctccgtccatattcagctcagagctaggaatggtaatggaattaatattggccaaatcggatttcagtccgttgacagccacagaaggacggctgctctctatcccagtataccggtatccgtctgccaccctgccctccggctcaaagttcagcaccaggctcttgcgcttgagaatcggcattgtataatccacgctggagcggctgaaggtgatgcgctcgtcagtgggtatttcattttcattggcgtcaaagcacactacaggagcgctgtctgccaggttggagtctgcgccgtccacgttgatcacaattcccacagcgctgatctggcccaccacagacatgggaccgctgacattgatatagtttggcgaaacagaaggtgttcctctatcgtatccttcggcagcttcccctatcaccttggccctgatctcaaaggacttgcgctgcaaatcctctgtcttgacgcggatgacccccggctttgccaccggagtgtccaaaagacgtttgttgttcttaacctctatcttcaccggcactgcgcccgtgggttcatatatatcagccaaatctatataggccctgaaatccgaggcgctgatgcccgccttatccagagtccttacacggtagctgactgtaacggtatccttatccgtcagcagctcatatgtcttgccgttggacgtcaggattccttcattgacaatatccagcggcacctcctttgaatccgagtcctccgggttattgatgttcaccactgccagccaaacaaaaaatgccaggaagacagaaagtactttaagcccaagattattagacagctttttttccattcttcagccttcccttccatattttcaatcggttcaatgaaacagtctcctctttcacgttggaaagtacctttttgaggctttctgcatctggtatcctggacaacactcctccttctgctaccgatacccttccggtttcctccgacaccacgatggtgatactgtccgtggattcacttacacctacagccgccctgtggcgcgtgcccagggccttgctgatgctcatgttatcggtcagcggcagataacaggttgccgctgtaatgcggttgcccctgataaccactgcgccgtcgtgaagaggtgtgttgtgttcaaaaatattaatcagcagctggctggtcaccaggccgttgatttcgattcccgtcctctctatctccttcagggaagatccccgctcaatcaccatcagggcgcctgtctttactttggccatctcaaaggtggccctgaccagctcgttgatggtcttgtcgttaaatccctggttatccttgccctcgtcaaaggaaaagatataggacatgtaattgcggcttcccagctgttccagggccttgcgaagctcaggctggaagataaccagaagggccgtcaccgcaatggttgtggtattctccagaatccacaatatggtggtcagatgaagcacggcggcaaacagcacaaacaccaggataaccagaagtccctttaacaggttccaagccctggtgttcttaatccacaccagaagttcatagaccagaaaggaaataatcacgatttccagaatatttcccactgatatccttggcagcagcgacagccaggatgtcacttttaccagtatttccgccatactctcacctccttacgttcacttttcttcattaataagaatttctctcccttgtgccgcgtttatgggtactgattttctgtaccttcacatccggggtgctcacggtcatcttgggcaccgccttcacataataataataatcatcgtcctcgaactgcacatattcggtccgggtataatccacggacaggacaaaaaaattgaacactgccgctatagctgccgataaaacaagtcccagaatcatcggtcccacggaaacagataccccaaacacaaaatcccccacaaatatggccagcagctccgccacggatcctgccacaatggcgaccacccatgcgtaatccatggacagcctgcgtataagataaaccacgatgatgcccaccgcgcaggtggcaatcatgaccatcatggtctggttaaagagcatggatttaagaatctggctgtatttctgtacaatatccactgagccgtcgctggcagccaggatgcccgcattctgcttcacatatatgagcaggtagtacaggaacacaccgcaaccaacgggaatcacggaagccagacttcctcccagccctaccagcaaaggaaccacatagggaatcttaaacaggaaggcaaggggtgtcaggaccatcagataactgtccccgggcttgaatccgtagtagagtatggcaatggtcagtatcagcacaatggcaatcagggccatctccagggaaaccgcatatacatgggcaatcatcaggcagcccgccaggaacacgatggcgccgtagggcaggaatgcgctgaccagacagaccggaaggatgaccaaaggacttttaagctttgccatatatccgatattcgtattaaggcttaccacggtacagagcgcaaacaggaagcgcaccaccggctgtattccataactgtagcggttgtaaaatcctttcagatgttctttccatagcagaagacttgtcatcgaacccttcctcctctgttgtccttggtcctgtcggtcctgtctttgttgtcatacttcttgaccaggtgtctcagtctggaggcatacatggtctgggaacgggacgcgtagtcgtaccttctggaatatacgctccaggtcacaaacaggtaaaatgccagtccccccacataaaggatgccccagttcttgccgcacttaagcaattcttctatgcccatgccgcccaacagcacgtccagcttgtaaaggatccacagaagaagcatcaacagatagcagaaggtataaccgaaaaaggagcggaacatctgtccgccgacataatcctttttaaaataacggttgatgggaaatatcttcctgccctcattcttttcaaatatggccagcccagtcatatatctgaccttttcttcgttcagcatacaggtacctcttaggctttttcataacatatcaatttagtataccacaactttttcagatttgcgacactataaatcaatttttatgattttgtaagaaactggaatttggcttaagaaaccgggaccggaaccgtgacaggacccgggcggcgggaaaaaacaactttattttcccaccatcaccatcacggtccttggacgaatcctaaattcatttccccccagggggcccggacaaggcacattctcccacgtatctgccgccagctcccattccattccatccggaaggaccggcagctttacatcaagaggttcccaatacgcattggatgcaatgtacacggtccggggcccttccccctcctcctggccggcaaacatgacgcccacatagcgctcatactccgcaaaggagccgcaccagggcttcactccgtgaaagctcacatccgggaagccgcaggccccgtcactcacattggcgcgtaccagtcggtgtgtcttgcgaaaccgtatcatatattggaagaaacaaaatatatccttatactgccccagccgctcccaatccagccaggaaatctcattgtcctggcaataggcattgttattgccgaactgggtgttgcagaactcatctcccgccagaaacatgggtattcccctgctgcacatgaggagggcgcaggcattgcgcaccatgcgccgcctcagggcttccacctgaggatcgtctgtctccccctccgcgccgcagttccagctgttgttgtcattggcgccgtccgtattgttccatccgtttggctcattgtgctttacattgtaggaaaacaggtcgtaaagggtaaagccgtcatggcaggtaatgaaattcacggatgcgttcttcctgtcgtggtccgcatatatatccctggagccggcgattcgcagggccgccgcctgtgccatgccttgttctcccttgatatggcggcgcatgtcgtccctgtacctgccgttccactctgcccaacggttccaggacgggaaagtccccacctgataaaggccgtccgcgtcccacgcctcggctatgagcttgacatcgcccagaatggggtcaaaggcaagactctgaagcaggggaggcttgctcatgggcgcgccgtcctcgttgcgcgccatgatggaggccagatcaaagcggaacccgtcaatccggtaggccgtaacccaataacggaggcagttgagaatcatctgctggacaatggggtgattgcagtttaaggcattgccgcagccgctgaaattgtagtagtatccctccggagtcagcagatagtatatattgttatcaaatcctttaaaagaaaagaagggcccgttttcatttccttccgccgtatggttgaataccacatccaggtagacctcaatcccatgctggttgaacacccgtatcaggttcttaagttcattgccctctcggttgtactccgtgctggcagtgtagctggtgttgggcgcaaagaagcttacggtgttgtatccccagtaattataaagcttccggccatccacctcccggtaatcctgcatctcgtcgaattcaaatatgggcatcagctccaccacgttcacgcccagctccagcagatagggaagcttttccaccaatccatcaaaggttccgggatgaagtacggccgaggagccgtgcatggtaaatccccttacatgaagttcataaatgattaaatcctccatgggggtcaggggctgggccatatccgcccagtcaaagtcatccttgaccaccctggccttatagtgctggcatcccggcagcgggtccccccaccggctctgtccggtaaccgccttggcataggggtccagcagatacttgttcttatcaaatataagccccttttccggttcataggggccgtccacccggtacgcatactcaaattcgccgatgttcagcttgaacacaatcatggagtacacattgccgatgcggtaatgctttggaaagggaagaaccgcatagggctcctcctctgtccgcctaaacaggagcagctcaatggcagtggctccatgggaatacaccgtaaaattgactccccccggtatggcggtggctccgtttatctcatagaatcctggcctgacctcatattctcctatgcagtccatgggtaccaggtgaatggtgccgggcagggccaggtgatcaatactggccggtcttaaggctttcctgtccttcaccgcgcttttgtcccatgttacatccgctgtgcgtctggcggctttttttcccttatcctccatacattcctcccatgtgcgcctttgtcgggctgtttcaggcattgtattaacaatatacaacattccgggggatattacaagactcggaaaaggccgccggactcaaactgatccggcggccttttccttctgtctgtttttaatctgacagcatcatcttatttatttctaatatctctcccactttatcttttccatgggcagctcatccaattgatgggcaggcgcctctgcagccggcattccaagggtaaggatggcttccagcttatatctctaaataaatccatggttttcttcctttctgctgccgcacccatatggtgccggcttacagtttcagataagcttccagcacatccttcatatcgcaggccataccgtagtccgcagtattgaaaatgggcgcgctctcatcctggttgattgccacaaagagcttggtatccttaatgccctccgtgtgctggatggcgccggatacgcccagggaaatgcagaccttgggccgtatggtgaatccggtctgtccaatctgatgctcaaacggtataaatccggtgtctgccagaggcctggtgcctccgattgcagcttccagcttttcggcaaacgcttttaagagtgtaaagttttccccgctctcagcgccgcgtccgccgactaccacaacctccgccgcaaggatactgtccgtatcattcattgcaggggcgcttgacatcacctgaatcccggattcaggaagggtgatatccttgtaatatgtaacatctgcccttctgccctcccggacctcacagggggtgtacacccctggccttaccgtcatcatctgtggatataccccttcctttgttacaatggtgacaaatacgttttctccaaaagaaggtttattctgcttgatgaaaaaggtcccgtcctccctggtatccacggctaattccgtacagtccgcagtcattccgcagccaaggcgggcagccactctggaaaaaacagagcgtcccgtgggagtagccggaatcagaacactggacggatccatacgtttcagcatttccgccattgcccggcttaccgcatcgtcctggaacaggcagtttttgtctgtctccacggcatatatctcgtcaaacccaagctgttccagctgggccgccagattcccgcagtcctcagccaggacggcggcctgtatcttctcaccggtggtctctttgatacaatgagccgcgcggaccagttctgccacaacgggttctaacttcccatcataattttctgcaaaaacacaaattccgttcgccatctattcctttcctttctcgatgtcaatcagttccctgagcctggctgccagttcctccggagtgcccgcaagcatccaagctctcctggtgctctcaggctgaaaagaatccgtcaccattgtgggagagcccggaaggccaatctcatccgccgccatcttaaggtccgcattggtatatacctccagagacttgttcttggcggccctcttggagcgcagggttgccagacgcggttcattgcttccgaagcacacgctcattaacgccggcagggctgccttaatcttccactccatgccctggtactttttcacagccgtgatacagtccttgtcaccctcatcgtatgagagcccctgtatttcagccacatgggggatacccatgtattccgccaccatggctcccacctgtccggtggcgccgtcagcggacaatgcgccgcttaaaatcaggtcgaatttcccgtatttctcaatgctttttgccagcaccttggctgtggcaatggtatctcctcccgcaaagcaccggtccgtgatgagacaactctcatcacatcccagggccagggcgtcccttaatgccttctccgagtcaggggggcccatggtgaatacggccacctttgcgccggtctgctcctttaagaccatggcggtctctatggcattcaggtccgcagggtttatcattccttctgaaccggaacgaatcagcgcatgggtttcggggtcaacggaaacatcgttggaaacaggaacctgttttataagaaccgctatatccatcttttctcctctccgccgctttcttattttaacagacgctcaaacgcccagtcttccaataacggtgtcttttctccgcgcatgatgaattttgcaaggtccctgctggcagcaggtgcctcgataacgccgttcccgccgtaaccggttgccaggatatagccctccaccggtgtcttgcccagaatcggaaggaaatcctttggctccgcgcggtatgacagccaggatgataccagcccgctgtccacgattccgggtaccctgcactctaactgatccaacaggaagttgtgttttttcgataatctggtaaaatttattgttgatacattgtcagaaatgcaataagagaccgtatgattttactattttaatacggggagagaacaaatgtgtcctaccatcacagccattaccacctatgtgctgcagcagctggacgtgcgccgtttttggacagtccgctccgtctacaaaaaaacagtgaatatccaggcaggagaactccttctggccctccaggccgcatcctcgcccatgtcccccatcagcatgttaacggacatggaggtacgggattttgaggcgcttccggttaaaccgggacagcaggtatccatttcccgcgaccggattcatatatcctctttggaaaccccggtgacgtttctgttacggccaaaagaagtccaaagcacccgtttaacctcccctcctgctcagtttccctggggcaggcttctctcacaggtccggcaggccatcaccggctcacaggccggcatattccgtcttctgttctgcgatttcacggacccgcaggctgtaaagacaggcggggaatacagcctgatcctacagcggcacaaaatcatatccgccaatgcggtatatgtctggaacagggcatgtacggggggatgcctcccaaagcctggccggactgacaggactggggataggccttacgcccgtaagtaggtaataatcagtatctgcaaatttccatccacatttgataagataagttcaaatgatggaggtgataccaataaatacgaatgacaatgcagcctcaaaggctgacctttgggcagaccggttccatgctttccaggaaagcggtttatcccgcaaagaatggtgtcagcagaatggaatcccacagtctacactgggttactggatccgaaagctccagtcagaagcagctgagacagaaagtgcttctgatccggtgtttgcaaagctcccttcggaacatgaactccatttcagtacagcaggtacaggaaaacctcctgtgatgctctgtctcccggaaaatatccggattgaagttgctgcggactgtccagccagactgttgactgccctgcttcaggccttaaagaactatgcttgatttttacggaagtactacagtctatctggcatgtggctgcacggacctccggaagagctgcactggtttagcggccatcatcaaactgaaattccatctcgatccgtactcccgctgtatgttcgcgttctgcaatcgcaggcgcacattgctcaagatccttcagtgggacgggtcagggttttggatcctgatgaaacggctggaccgcgattccttccattggcctgacacaccggatgaactgcagaaagttacgctgaaagagatccattggctgtgcgatggtttatccctgaaccccagcggcgcatttgaagaacgtcacccgaagatcgtcatatgagcccggatcctgtcaattcgcaaaaagccgaaaatcactttgttttgggcggattttcctccgtcccggaatgcagtttcctataggaacggaatgctttttctggtatactttctggtagagatttcagaaagttgaggctgtgttatggatccgctttttacagaggaacaactgaacaagaaagtgccttcggcacctcaactcccctagcccctcattcatgaggggaattagggcttgttttttgcgtcattttattccataataatctcatgaatgtgattcagaagatgctcagagactattacgaaatcattgaatacgatataaaacccagacctgtcgtcatggaaaacattgataaggtcattaactgcggggatccttcttatggtggcgccatgtatggctgtccccattgcggtaacctcaagttcgttcctttccgctgccactccaagttttgcccctcctgcggcgctaagtattccaatgacaggtctaccgctatgtcttttaaattaatacagtgtacccatcgccatctcgtcttcaccattgacgaatccctccgccgctttttcctcgaagaccgcactctgcttaactgccttttcgaggctgtttctgatgtcatcaaagaatattttttctccctgaacaaatccaaaaactttgtccctgggtttatctgtgtccttcataccttcggtcgccctctcggttggaatccacacatccactgtctccttaccgaaggcgggttttctgatgatggtgtctggcgcaaggtcacatatttcaattattcctacctccgtaaatcctttcagactgttttgttaaataaactggaaaaacgcatcggtccctcttttaaaaagatgaaagccgccgtttaccatagggacagaaatggattctacgtttatgccaagcccaatctttgcgacccaaaatccattattaaatatgtcagccgttatcttggccgccctgtcattgctctttccaggattgattcctacgatggggagatggtgactttccattacaataagcatgaagacaactcttttgtaaaaaagactcttcccgccattgatttcattaagctgctcattctgcatatacctgaaaaaaacttcaagatgacccggtactatgggctttatgccagacaccgggagattgacaatcagctccataaagcagtcccaaaatccaaacacaggattctcctcgatttcaacacctggcgtaagcttttccttcttaccatggggtacgaccccctgcaatgcccaaactgcagacatgaaatggtctttctagagctgtaccataaacatgaacgggttcctctggatgaattatacaaaaggacaaggataaggcatggcctttatccccggtcccgctctgcttgactttctctcccatctgcttcatactacatttattacagatgggaggcagttgcaaatgaatcaaagatatgtggatgaactcagacaaaaatacatcaaaaatcctccagaaggaatgacacccaaactggtcagaaatatgaccgattctgatttattggatatgcattactttttaactgaagatgacgacctcgacgatgatggatgggaagaagggttctatatcgacctgttctaaatcaccgtctgttttctataccctcctttggcagaatcattagtttacataactttatttcagcaaggactttggtaagtaggtaagccccttacagggcttacccctctcagaaccggacatgcagctttcccgcatccggctccctgcaaagctaatacatctacagttatccgtatatactgacataaatacgtggccgcacaagcgggaactgtctcattagttccttatatccttccttcgtatagctccttctctgacttcttctgttcagccagtagaataacctaaaccataccacattattgaatgagttcaggcttcttgaattgtcagtaattccgtaataatgataataaccagtcagtacttcatttagtttctttactatcctgtttatctccagaaacctcatgtctcttatcatggcgtttatttccctgcttttctttgcaagctttttcttactggttttcctctttactctgaactttcccgtcctgccatgcgaacagtaatgcgtgaatcccaggaatgtgaacgtctccggcctcccttttccccggtctttccggttactttctgcgaatcggccaaattcaatcaaccttgtcttgctttcctccaattctagtccaaagtacttcattctgcgctttaagtgttcataaaatatttctgcatctgatttatattggaagcatcccacaaaatcatccgcatagactaccagccccgcatatcctctcatcactggctgtactttctccctgaaccaccatatcagcacatagtgcatatatatattggctatgaccggggagcagtccgagccttggcctgccccttcttctgtctcctcatatctgaaatctctcatgattcccgctttcagcatccgtcttaccagtctgataatggtcgggtcttttatccgcgattctatgaactttactatccattcatggtctaaatggtcgaaaaaccctttaatgtctgcgtccagcacccaattcgtcttttccctttccagcatcccattcagtctccttaatgccatgtggcagttccttcctgggcggaatcccatcatttcttcgtagaaatggggctcgaacactgcttccagtattcgccttagcgcttcctgtactaacttatcctcatagcaggatatactgagcgggcgggtctttccattttcttttggtatttccacccgttttgccggtttgggcttgtatgccttcttcttcattttcctgattaattcatctaagttttcttccaaatttacttcgtagtcctctttggtaattccatcaattcctaccgctttctttccatccatctccttgtggcattctttcagtaactctttattaatcagatgccctatggacgtaaataccatttccggatgttcgcttgacaactgtgatattctcgccaatttcgtttccataatttctcctgtctctgcgtacagattatgtttcctctttgatatgactttgcatggctgacctgcgaggacaggtctctctcgacttccaccgcttttttttgctgtgtactattcggccatccgacttctgccggccatttacggttctcctttctaccgttgttccgtataccgggcttacgcaacctgcccggagcctggcagacctccccagttgacttaaaatccttgattacatgaccagccttaaaaccccggggaagcagctgcattctcgctcttaacgactacagctgtgttgctttcagtgtataggagcacttctgccttcccaatttcattttaatatcgaagctatatacggctatgccctgcaatcccgctgtctacgcttagcaggcaacatcgctgctgtccacccaagactcgcttgatgcggtatagcttgtaccttacaccgtgggactctcacccactaaatttcaagcccttagctgggcgcaccctataatacaaaaaagcaggaaaccgttttgtgatttcctgctcggtggggcggtgggtattcagttgttaatgcgttctactgcgtaacatacaatcaaaaccgtatatacggacaagacgggcgtggtggttattcaatagctgccgtgtcccgtcttttttgctacctgatatactttctatttttcgtccgcacgaagaagctcaaatatcttttctatccattcttgcatgatttcattctgttcgggtaaatagcccatgatgatatattccatgtaagtcatagcagtacccataattgcatatcgagtagaactacttttctgttcttggtaagtgtccgcaaactccaaagctcttttgtttgtggttttccatactcttatacgattttcttctggcagctcatgttccctcaatatttgcaaaatattagccgctttttgcttatcgccgttcatattcagaatggcaatttgcatacagcgaagcgattttatataactccatagtgtatagtcaccattaaattccacatggttatagatactgcatacttcatagcataaatcgttaaggaaagaatcgaaggtggtgcaaacgaaaaagcagctttgatatttcgataactgccctttcgtttgcatcagtttcgatttttcctggttgaacaaaggcgcgtccgggtagccgttatatatggactttcaatttccccagccttttagcgaagtatactgcatatggatgcatggcagccagattcggcgtccggtgtcatgtttatggcatcagaaataagcctccaaaggaagcttaaaaaatattcagttgccttttttaacatagaagatgcggttctggcattgtacaaggctgccctgccggtaaaggaatgatccttccgccgcaggaagaacacctgcagatatccttattgtaaagcagccggatcatggcaggggcatccagatctttcagccttgcgatatactttctacagccgaggagattccggcacaaggtgatcttcttattcttgttccgggatgacagcaggccatagtggcgtatccggacaaaacgcttcggcgggacatgcatcagaaatctgcggataaactcctcaccgaaaaccgtaatctcctcccactggccctggtttttataatcttttgcagtaaatgtgaccatagaatccgtcatgcatttgatacgataattgctgatggcaatccggtgtgtgtaccttccaaggtacctgatgacggattccgcgccatggaacggcttcttacagtagggtatccattcttttttgtaacaggtatccaataattcctgtaaggcataatggttcctgtaaggctctgccgtaccgtggaattcgagttttccatctttccatagctgtttcagttcagcaagatattttccgcggaacagccgggagaccaccctgaccggaaggaagaagtcctccccgctgcctttccagtgatttcctgcatccagcccgcctcccagaacaatggcatggatatggggatggaagttcatggcgctcccccaggtatgcagaatgcagatatagccgatgtcagcgccaaggtatttcgggtcagccgcaagttcacgcagggtatcggacgcggcatggtaaagcgctgtatataaaagtttctgattgctgtagataacagggttcagattttccggcacagtgaataccatatggaagtatggcgcgtccagcagatcctccctgcgcgcgtcaacccatttttctttcgggaattcctgacacatagggcagcatctgtcacggcaggaattatagtggatggaaatacagccgcaatcctcacagacgctcacatttacgccaaaagcaccggtcttgcagttcatgatgtggtaagccgcctttctctgggcaggggaaacatcatgggaagatgcataggaaggataaaaacggttaaaaacatcctggattgtgcagtcagtgttcattcctcaccgccttgcggaccatcgaacgggctgcggatgccgaggagggtcttgttgcttacatggaggtagacatcggtagagcggggatccacatgcccgagaagggactggatatatttgatatcggtcccgctttcaaacaggtggctggcaaaactgtgtcggcacgcatgggaagagacacggcgggtaataccggcaagcctggcgctttttttaaagaactggttcacactggttatatccaggtatccaccagtccaggagcttgggaaaagtatccccctgggccggccgcatttgtaccaatactcggtaagaaggtcaagattcttccgggagaggatggtatacctgtcgatcctgcctttggtttcacggacatggatggtcatgttggtacgggaaatgtcatcgtaatggagatggacagcctctgagacgcgtaatctggaagagtacatcgtcgcaatgatagctttatgcttcaggttttgggtggcctcaatgatcgcgtttatctcattacggctcaggacggcgggaaggttccgttcccttttcatggcaggaactatgtcatcatcccaaaggatccagagcacttttttgtagaagaacttaattgctgaccgatagtggttgtgagtttcgggagacctgccttccaaacgtttggcagagaggaaactttccgcatcgtcaagtgtaagctcagaggcggttttcccaatacagcggagaaagtaattgacattggcacagtacaagtttatggtactttcccgcaggttccgtttttccgcttcatagcggatagattcaaaaatatcatcgtacataataaaacctcctgaaataagcagcgttgatcgtggcagctgcctgtcaggaggggcattggcatcataattccgcttgcggaagacaccaaaaaatgctattgtattcataggcagtggaggtttccgtatttggttgttttgtgtggtaacttaacaataccgtattgcggaagatttttccactgctttttatttagaggaacgtaaaaactgcgccacagccttggcaggccatcgcgtagcgattttgttcggtcagttcgttttcaaatctgccgatatagttgaaatagacttccacacgatggacagcgtatcttgctccctttacatcacgctcatgcacaaggattttgctgataaactcgtttaggatggcgggggtaagggtggaaaaagcggcatagcgttccgccagcttcacaaacttctgtgcccgtccgtctgcattttcaaaagcggatagctgctctttgatttctgcaagctccgctttcagcgtgtagtattcttcggaatacttctgcgacatctgctcatagcggtcttgctcaatcctgccgagggcaatatcctcatagagcttattcagtaccttgtcgatctgttcaagccttgacgtgatctgcggtatgcgcttttgctgtttcttcaccttgtccgtctgctgcatggaaaggctctttttgaccaatgcctcaaagtccgccttgttgctgatagagtaatccgcgattttccgcagcacgtccgcgacggtctgcatgagtaaatcggcgtcgatgttgtgcggggaatggcactttggattcctgcctttgcctttgcggtattcgctgcaaaatgcaatgtgccgcttgccgccgttcctgtaatcaatgcggatgtgcattttcgctccgcaatccttacagaaaagcaagcccgacaaggggtggatttctccgtccccgtttggccttttgacaggcgcgttttccaatatgcgctgcacgttttcaaatatctgccactggcttttgtctacatagtggtttcgtttatccctgtaatgcttcgcggtcttgaagttcaccacatcgccgcaatactcctgccttgtgagaatgcgggtcaaggtcgccttgttccagttgtagcggttttcctcgttcagatttcggcttttcgatgttcctctgttgtgctctttcaaataaaaggtgggcgtaaaaacttcctcgtttttcagatatacggcgatctgatttcggtttttgccctccatgaaaaggctgaaaatcaagcggacaacggcggcggcttcctcgtcgataatccaaaaatccttgttgtcggggtctttcatatagccgtaaggggcttcggtagcgattggctttccgcttgcacctttggtcttgatacccgtttttactttcttgctgatgtcctttgcgtaccactccgacatgatattgataaacggcgcaaactccaatgtgtcgggcttctcgctgtctatgccgttgttgacggcgataaagcgcaccctgtttctgcggaagatttccatagcgtttccaacctggagataatcacgtccccagcgggtcatgtctttcataacgacaataccgattttgccgctttccacatcgtccatcatctgcacataggcagagcggtcaaagaacctaccgctttcgtcgtcgtcgatgtagtgtcggatattcggcagcttttcctgtcttgcgtacctctctaaaaaagccttttggttgactatgctgttgctctcgccgccgtccctgtcctcgtcaccaactgaaaggcgagagtatagcgcggtgatcttgttatactgcgtcatggcgttatcctcctttgcgtccatatatgcgtccttacagttgatagtatgcaccccacctcgcagagccgtactccatgccatgccggaatttcttggcattcttggctttgaaatacaccacaagccggagtgcaatgccacaccctatccctatcagcaaatcttttgggtggaaacttggtaacgggttggaaaataagtcctccatccccgccatgacctccatcgcctttgcggaagcgtcctgccccggcgatacccgccacagccacgcaattttgtcgcagaaatacccggcaagcacataagggagattcataaggaaaagtttctttttgtcaacattccctgtctttgccttgagcttttccgggattgactttaggtctttggcaatgccctctacgattttactcataatgactgccccctgtccttctggtgttcccttgccctctcccgatttttgtctttccccaactgctcccggaactgcgccagcttctcctttacggagatgcggttatgctttttctcattaacttttacaaactccttaaatgcctgcgttatcacgtcggcatccctgcccttgaataatacgatgtgcttcggcggcttctccgtcttgtccttcttcacagcgaactgcacgttgtacttctttgccactctctcaaaggacttgatgttgttatccgtcacctcaatgctcgaagcgcccataccctgaccgaccagctctttcactgatattttcccatgcggcatctgctttccctgtttccggtgttccagatacatcttcatagcctttttcagcacgacggcagtcagccgggaagatttaaacacaagggcaatggttttctgtgtcacttcctcctgcatggttttcctccttctttttttattgctgtacgcccgtcagggtgggacgtacagcctgtggattaaatatttcataagctctcctttcccacttctggacaaaaagtccaaaagctgtatttatcctataagcacccggaacggatacaggattcgtattcttccagtcttgcgcctgcgtcctccccgtatgacagctttatgtcacagaagtcatgcagtgtgccggataacaggaaatccttataaaaccttgcaaaatcgctgcaaaacttttctatgatgcgtgtaaaatcatcattctcacgatattcatagtaaatccgcttcccgccagtgctgccaagcatatccgtaagctggtaactaagctctccggtctgcttgacggaaatctgcatcaggttatagtcattccgcagcttaaaataggagctgtggaactttgacgatactgtaatgttgggattctcccccaactccgcacagaccgccgccagccttttcaatagctccgctgttgcttttttctggaactctctttttttcattacatcctccattctgcttctggacaaaaagtccaaaagttatataaacacaaaaagggcagctacaaaccgctgtttacggtctataactgccctcacgctgtttctggtatttaattatctgtaccggatcaccggacactgctttgtctttttccctgctttcctccgttccagagcgaaaaccatatccccggtacgctcaaaatatcctatatcctttttccaactcatgccgcatttacaatgctgcaagccgataaactgctgtttcatcttccttccgcagttcgggcatacttttttgctcctgcccttctgctttgctttccctgtttccggtatcattcagaccatctcctgtatttttaggctaatgccattttaccagatttatcgccggaattgtagattatctacaatttaaccgaaagcgtctttgcacagggcaatgaaatatctctttttctccagtatttcctcttgcctgtctttggaaagcgtctggaatatctcgtcatagtcaagctccgcaagcggcgtacccaacactggcgttaagacttcatgttcataccatatccgccagagttcctcaaacagttcctcgctgtccgaaaatgccattgccgaatcaaatccttctccctcactgaaccattgcagacggacaaagccgaacctcccggcatccgccaccattacatcggtcagctcatacagctccgcaaacgcttccgccaccttccggcattttgcccgctgttcttccgtaataaatttttctgccatagcgcacctcctattttacttctggacaaaaagtccaaaagctatctatcctcttttaaacagtagattgtacagaggtcagcgtataacacgccttccccgcattttattgtgtcaaataaaaggcattggaacaatacgtcacgcacatcttccagactggcgatgccctgttccttctccgaaaagcctgctccgggaatatccatatccgccgatgccgcccgccttgccgagatacagtgcgtgtaaagtccgaggatatatttatctgacatagggaaagcgaaggtttcctgcccgtcatatgttaccctgtatttttcctgttccccttccggcagttcaaagatacaccgcaccgtttccagataagtatgcccgtcaaaatccggctttattttcttcccatacctgcgtattgcggaaaatatgctgttccggtcaagaaaagaacgggtacgctgaaaagccggcttcctgcccttaatgtccatgtaaacattattccctgtccccttcccggcaaacctgccataatcgcctgtccgcagcagataggacaatacctccagcagcttttcccttgacgcaatctcctgataaggggaatctccaaactctattcttataaacctcaatgggcagctcccctttgcgatttcccgttccattgcccggtcaatatccctcatggactccatttatccatctccttccgctttgcgctcaaacatccccttttcctcccagccgccgccatacatatcatgctgaaccaactgctggtaataatggtttatggtgttcggggcattgtagagggcagtcaccatgtacgccctgatgttggttatccttgttgtggtttccttcatgcatccgatgacatattccaaatgggagctgtccagctttaaaaacttagactttacaagctcatacgggtaatcttccccgttgacctttaccgtcttacgcttcacgcacacaatctcgcacattacctcatacagttcctcatacagacctttttcactccaatcgccatatttcatatgatgctcatactcaatatttttcttaatgatttccatgtaggcgctggcttcatccatcacatcaatcatagcattatccggcttgcccgttttttgtttttctgttccactatctgattgattgataggattggtataactcagatcggtataattagtattgttataattagggttcgattcccgaacttccgcaagttcggtttccgaacttctgcggaactgtcagcattatccggcttttccggctctccgcccggttctttcccggtatccagtgtcgcaaaattcttcacatagataatgtccggcttgcctagcccctgtcttttcttctcaatcagaccgatgccttttttgctgtcaagctccgctatcacctttgcgcatttctcccttgcgcatcccaaatcctccattatgttatcaagggtgtaatggatatacacccggttttcttcgtcaagccagccattcttgattgacaatgccagcctgtcaagcatcagaccataaaggagctttgcatcgctggacaactctttaaaccttgcgtcttttatcagcagcctcggcactctgtaaaaagagaactgttccgcttcgatgccataataatagtcgaattttattgcgccatccacgccgatgcacctcccctctattgtcttttcattccatttctggcactccattcatccagaagctgaatgatgatgccctctatttcctcactgctgcagtcctccgcaaaatattcgctgattttatccgctttcagtgttactttccgttccttcggcttttcttctgtcagtatcaggcgcaccattgcaagggtaagctcccctgtcttaccatattccttgatttttgctgactgcgccatgctgacgttacagcctttttcctctatgactgcctgtacccactgctgcgcttcctctgccagaaaggaaatgtcaacgccctgtgagaaaccgagttttttaccgtccaccatagcaaggagttcatcagacaggcgggagagccagatataacgctgaaccttttttgcgttctccccggcagcttccccgacctcatccagtgtatttctgcctgactttttcccctgatgcttcatggcttcatatttcatcttgtaggctctcgccttttcactcggtaaaatatcttccctctggatattagaatccaccatgataatcgtagcttcatcatcggtgtagttgcggacaaccacaggcatctctgtctttccggcaagctccgagccacgcctgcggcggtgtccggctatgatttcatagccgccgcccgccctcggtcttgcaatccccggcacaagcaccccgtactggcggatactctcggttgtttcctccatcttctcatcgtcctctacccggaacgggtggtctttgaacgcataaagctctgccagcggcgcattgataatctgctctgccccgttttcctgcgtggcatttccgccaaacaagtcatcaaaactctccatcctgatttttactgcgcttcccgcttttgtgttactgcccatctgcaagcacctcctttgtcaaggaatcataggctgacgccactttcccctctggatcatgcttgtagatgctgacgccctccgctgaaatctccgccgcccggacggaaataggaatgacattggcaaatatccttacccggcttccataggcttccttcagcatggagctgatgtcctttgcgtagttcgtccggctgtccaccattgtaagcagaatcccctcaatctctaatttcgggttaatctgccgctttaccttgcccaccgtcttaataagctgctgcaagcccttgacgggcaggtatgccgcctgtacgggtatcaaaatgctgtcagcgcaggcaaaggcgtttatggtaatcatgccgagggaaggcatacagtcaatcaaaatgtaatcgtaattctccctgacaatctctatgtatgaccgcagcaccgtttcccggctcatcacattcacaagggaaacctccagcccggaaagctcaatgttccccggcattaagtctatcccttcctcatggtggagaatgccttcccccggctctacttcctcgtcattgattaaatcccccataatggttgcaagcgtgacttccaggctgtccggctccgtaaagcctaagctggctgtcaaactgccctgtgcgtccgcatcaatcagaagcactttctttccctgttttgcaagtcctatgcctaagttgcttgtggtggtagtctttcccactccgcctttctggtttgcgattgcgattattttacacatgataattctccctttcttctactggttttcttttacgttgcttttcctgacttccacataagtccggtaatatttctttgtccctttgtttgggaacatatcggaaaactccgtcacttcgattttcgggttcctctgtaaaatcttcccgaaccacttaatatcgttcttcgttcccataagcctgacctttaacatcaatcccgtcctccaagcatggcgtacagattatggttatatgttgcgtattccgggtaacgaatctgtaccgcctgccaaaaatagggcgcataggcacagcagaacagttcttccactgtgtaccgtctgcactcgtccacctgttcctccgcatcatcatagtcaaggacactcggcgtaccgttacagtaaaggttaaacgccatcctgaccactctcacgcttccgctggtctgccagccttcatgcaggcactccgttttcacgcagcctgtcttaaaatcatagatactgtaaatgttccttcttgtgtcatcgctgatgccaagacaatatacaagtgctttgtggtatacgtcctgacacctgacctctttcaatttgtcatagtagaatttttcatgtgcattgctgataaaaataatcgctttctctgctcctaacgctgtactactcatgttcatttcctccatttcttattttgttttgaccataacaaaaggacacttccctaaaattttcttttagaaaaatgtccttatcgtacaaaatattgaattggatttatgagtacaactattcattaacgctcattattctttgttatgcgttgtaaaattgttgtaaatttgttgtagtttacaagttcaagtaccgcaaacccttgattttactggttttctttgccaagcgttttcattgtcgggaacagcagcacatccctgatggccggtgaatccgtcagcagcatgaccatacggtcaatgccgaatccgattcctcccgtcggaggcatacctacctccagcgcattcaagaagtcctcgtccgtatggttggcttcctcatcgccctgggccagaagctcttcctgggctctaaaccgctccctctggtcaatggggtcattgatttcagagtaggcgttggccatctcccagccgttcatgaagaactcaaagcgctccacgtagtccgggttgcccggctttttcttggtcagaggagaaatctccaccggatggtccagaacaaaggtgggctggaccaggtgctcctccgcaaactcctcaaagaacaggttcaggatgtcgcccttcttatgacgcccctcaaactccactcccttttccttggcaatggctctggcctcttccagggtatgaatcttgtcaaaatccactccggcatacttcttaaccgcgtccaccatggtgatgcgtgcaaagggcttgcctaaatccatctccacgcccttataagtaatggtggtggtacccagtacctcctgagccacaaaacggtacagcttctcggtcaggtccatcattccgttgtaatccgtatacgcctgatacagctccatcagggtgaactccgggttgtgcctggtatccaggccttcgttgcggaacacgcgcccaatctcataaaccctctcaagtccgcctacaataagcctcttcagataaagctccagggatatgcgaagctttaaatcctcatccagggcgttaaaatgggtctcaaagggccttgcggcagcgcctcccgcgttggaaaccagcataggagtctccacttccatgaagccctctccgcccagatatttccggatagcagccagaatcctggaacgcttgatgaaggtatccttcacctccgcgttcatgatcaggtccacgtaacgctgacggtaacgcatatccgtatccgtcaggccatggaatttctcaggaagcacctgaaggctcttggaaagaagggttacctccgtggcatgaatggatatctcacctgtcttggtggtaaaggcattcccctttacccccacgatatcgccgatgtccattttcttgaaatccttataagactcctcacccacgctgtcccttgccacatagacctgaatgctgccttttaaatcctgtacattgcagaaggaagccttacccatgacgcgtttgaacatcatacggccggcaatggctgcttccttcccctcccactgctcatagttatccttgatatccatgctgtgggcagtcacatcatattttgtaatctggaaaggatcctttccagccgcctgaagctccgccagcttatccctgcgcgccttcagcacgtgatttaaatctgtatctgcctgattaaccttttgctgttctcccacgtccttaactcctttgtgttagatttatgaaaccctctggatttccagcaccttatactggatatcccctgcctgggtctccacgtctacgcagtcacccactaccttgccaatcagggcacggcctaccggtgattcgttgcttatcttattctgaaggctgttggcctcagtggatccaacgatatagaactccatctcctcgtcatactccacatccaaaagctttaccttacatccgatattaattttatccaggtcgatttcatcctctaccacgacttcggcgttcttaagaagcttctccagttcctcgatacgcagctcaatgtccctctgctcatccttggccgcatcatactctgcattctcggacaaatcgccctgctctcttgcttccttaatcttctgcgcaacttcttttctcttgacaactttcagattctgcagttcatcttcgtactgtttgagtccggcatatgtcaaaatatgtttcttatctgccatcttacccgcttccttcctttaattcttaatttatgttgatttcacttgagtatcattcttaatgtccacacattctgagtattatataggaaaatgtgtccattgtcaagattggattttcctgtccagaagctccacgaacccctccaatgtctccacctgattgatttcattcctgagcgtggctgagtggggcattccttttgtataccaggccatatggcctctcatttcccgcatggcaacactttctcccttaaaccggaccagcatgcggccgtgccgcagaatcatggcctttatctcaaccatggacgggcccggaaggacctcccctgtatccagatagtggttaatccggccgaacagccacggattgcccttggctcccctggccaccatgatgccgtcgcagcctgtctctttaagcatcctcccggcatcctccggcgtaaagatatccccgtttccaatgacaggaatccttaccgcctccttcacctgacggatgatgtcccagtccgccttaccggaataatactgctccctggtgcgtccatggacagccactgcagcgacaccgcagctttccgccatctttgcaaattccaccgcattgacagaaaggtcgttaaatcctttgcggaatttcacggtcacaggctttttcaccgctttcaccatggctgtcagcactttcttcgcctgcccggggttcttcatcagcgcggatccctcgccgttgttgacgattttcggcacaggacatcccatgttcacgtcaatgtaatcatagggtccttcctccagcctggccgcaatctccgccataatatccggttctgagccaaagagctgcacggcggcggggcgctcgtccgggtcaatctgcagcagctccctggtgtttcggttgttgtacagaaccgcctttgcgctgaccatctccgtcaccacgcagcccgctccctgttcccggcacagcacacggaagggcaggtccgtgacgcccgccatgggcgccagtattacattattctcaagaactgtatttccaatcctaagtttcatctaatcttccccgtcatcctctatatctatgtcctctcccaggaaaaatgtcctgtaatacagttccagcgcttccagcatttcctttttttcttcctggtactgcttgattttaaggacgcttcctatctcgtcaaagagataatccgtttcctctgaggttaccctgaattccaggtttcctttttcgtcaaattccatggtcagcacgccgcccacatcctctgtatagagcacacacatgatctggagttcgtcccttatggactgtggcagggatttgaaatcctggttaaaataatatttttgttcataggaattggctccgcagagcactgtcgtatccttcatctcatctctccacaaaagtccgctgcctgtgacaggcggcggactttccattctatcgtcgtttatgttctcatctaccggattagcggatcagcatcttggctatctcatactgctcttccgggatgtcctttgtcatattcagggcttcctggatatcgaaatccacaaactcaccgtgcttataggccaccagacggttgctcttgcctacggccagaagctctgccgccttggcgcccatgatggaggcatataccctgtccttacaggtaggcgttccgccgcgctgcatgtggcccaggatggtggctcttgtctcaatgcctgtggcagcctcaatgcgctttgccatggaaccggaatggccgattccctccgcgttgatgataatgttgtgtttcttgccccgtctgcggttgtcgataatccggttaatcagagcctgctcattgccgtcatagcgctccgggagaaggatatcctccgcgccgtttccaatgccgcaccacagcgcgatgtatccggcgttgcgccccataacctccacgatgctgcaccgctcatgggatgtggatgtatcgcgaatcttatcaattgcttccatggccgtgttgacagccgtgtcaaaaccaatggtataatcggtacaggcaatatccaggtcaatggttcccggaaggccgattgtattgatgcccagggcagacagctttcccgcgccccggaaggaaccgtctcctccgatgaccaccattccgtcaatgccatgcttgcggcagatgtcagcgcccttctgctggccttccgctgtggtgaactccttacatcttgccgtgtaaaggatggtgccgccgcggttgatgatgtcagacacgctggtggactccatgtccacgatttcctcttccagcaggcctgcgtatccacgcatgataccctttaccttaaggcccttattgatagcagtccttacaaccgcgcgaatagctgcgttcattcccggcgcatcgcctccgctggtaagtactccaatggttttcactgcctttgccatagcaatttacctccttgtattaagcacatccattacttctgtgctgacgtcgctctcaatcattcattctctcatctatatccaacgctattctaattcattttccccagcttttcaagacctttttctacgactttgacatttttttcaccaagtccttttcccagctcttccaaaagccctggcgtgacctgtacattccagttggccggaaggactttcttggccctctccttctggagataaatgaccacccggtcctttccctcgcaggaccgcagagatgtcagaaggcgctgctccccggcttgatacgtctccatatccgggaactggagccacagctccttgggtacactgtcaaagggaatcacctgctcgcacaccagctttcccaccggatcgtctccgatggacactcttcccctgatgaacagcttggaatcctcggtaaaaaggtcccggttggcctcgtaatcccttgggaacactatgacctccaccggtcccagaaggtcttccagcgttatgaaggccatgagctggttggtcctggtggtctttacggtcttgcctgccaccagtccgccgatgacagccctggagccgtcctccacccctgcctcgtccgtctcctcgtccacgatgaactgggcggaggtggctgttatgttcctcctccatgtatcctcatagtcatccaggggatggccgctgatgtagactcccagtatttccttctcaaaggcaagaagctcatcctttgagtattcccccacatccggaaatgtaatctggaattcgtttctgtcttcctcacccgcaatgtcgaaaaggcttaactgtccctcaaacatggattttttctccctggccttctcctccagcatggtgggcgccactgccatcttctgccgtctggttccgggcagggtatccagagcgcctgacttgatgaaattttccagtgttctcttgttcacttccttcatgctcatgcgccccacgaaatcctccatggaacggaagggaccgtttctctccctctctgccaggattacctctgtcacaggtttgcccacgctcttgatggcggacaggccgtaacggatagcgtcccctgacacggagaagccgctctcgccctcgttgatatccggcggcagcaccggaatgcccatcatgcggcggcaggtcagcacatactctgaaaatttacttacattgtccataaccgatgtcatgagggccgccataaactccctggggtaatagtatttcagataggctgtctggtaagacaccaccgcgtaagccgctgcgtgggacttgttgaaagcgtattttgcaaagtcaatcatctcatcgtagatgtggtttgccgtcttctcgtcaatgccgttgttcacacagcccttaaccccttccgactggttgccgtagacaaagttctggcgttccttctccatgaccgacgttttcttcttgctcatggcacggcgcaccaggtcgcttcgtcccatagtatatccggccaaatcacgcacaatctgcatcacctgctcctggtacacgatacagccataggtagggcttaatatgggctccagctgggggcagtcataggtgatggaagccctgtcgttctttcccttcagatatttgggtataaaatccatggggcccggacggtacagggagatacctgctatgatatcctccaggttctccgccttaagctccttcatgaagctcttcatccccgcgctttccagctggaacacgccctcggtcctgcctgttccgatggattcaagcaccttcttatcgtcaaaatcaatgtggtcaatgtcaatggttatgcagtagtccttttcagccagccgcaccgcgttctggataaccgtcagggtccgcagccccagaaaatccattttgagaagtcccagctcctcgatggttgtcatggtaaactgggtggtgatggtgccgtcagaggccctggacagaggcacaaactcgtcaatggaccggctgccaatcaccactccggccgcatgcatggaggtatgcctgggcagtccctccagacgcctggacatgtcgatgagataatggacctgttcatcctcattgtatgccttcttaagatccggattcatggtcagagccttatccagcgtcatccccagatcccccgggatcatcttggcaatggtgtcgcacagggaatagggcaaatccagcacacgccccacatcgcggacaacacccttagcagccagggtaccgaaggtgacaatctgcaccacctggtccttgccgtatttgcgcaccacgtagtcaattacctcctggcgccgctcataacaaaagtcaatatcaatatcaggcatggacacgcgctccgggttcaggaaacgctcaaagagaagattataacgcaccggatcaatattggtgattcccagtgtgtagcttacaatgcttccggcagcggaaccccgcccaggccccacgataatgtcctgggaacgggcatagttgataaaatcccacactatcaggaaataatccacgtatcccatggagcggataacatccagctcatagtccagccggctgctcagtgtgccgtcatcatccgggtaacgggtcttaaagccctcacggcacagatggtttaagtagctccaggagtcaaagccctcaggcacctcatatttcggaagcttggtgaccccgaactcaatctccacattgcagcgttccgctatcatatgggtattttcaatggcctcaggcgcataggggaacagggcccgcatttcctcctcggacttacagtagtactggcccccttcgtagcgcatcctgtcctcatccgccaccttcttgccggtctggatgcacagaaggatatcatgggccttctcatcctcggcataggtgtaatggatatcgttggtggccaccagcttaaggcccgtatccctgctcatgcgcataaggccctggtttaccagcctctggtccggcagcccgtggtcctgaagctccaggaagaagttgtcctttccgaatatgtccacatacctttcggatgccctgaccgcctcctcatacattcctctggtcaggcagcgctgcacctcccctgccagacaggcgctgagggcaatgattccctcgcggtaggtccgcagcacctcatagtccactctgggtttatagtaaaatccgtccacaaaccccttggacacaattttcatcaggttttcataacccttgttgttctctgccagcagcaccaggtgataataccggtcctcgccgcttaccgtttccctgtcaaagcgggagcccggggccacatagacctcacatcccagtatgggcttaatgccggcctccctggcagctttataaaaatcaatgactccatacatcacaccatggtccgtgacagccatgctgtccatgccaagctcctttgccctggctgtcagctccttgattttacaggaaccatccagaaggctgtattccgtatggacgtgcaaatgggtaaatgccattccctattctctccttatccttgcggtatcattcgagtaacagtttatcataaatccggataaaagaaaagagaaccaggcaagtcctgcctgattcccattatctatctctccaaacaaacggaccggtagttactggtttttcagatacttctcaatttcagttacagctgcttcctcatcctttccgtcggcttccaccaaaatggattcgcctgcggtcagacagagagtcatcattcccatgatgctcttggcattcacacgctttgcctctgcttccaggtaaatcgcgctttcgtactgactggctacctgcacgagcattgctgccggtctcgcctcaagtcctgatgccaattcaactgtaatcaatttctttaccataataatcctcctcattcctttgaatggtgcacagcccctgatacgttccaatggtcatgttccaatctggccgcatcccggctgccattcaggtgcccgtactgattcgtacttgataaaactattgcaaacttgatgtattacggtctggatactgctgccgcagttcctcagccacaaggcttaatttcctcaaacggtggttcacgcccgatttacccacaggcggttccagggcctcccccaattcctttaaggtcgcctccggccgttccagccgtatacgggccatctcctgaaggctctcaggcagacccgaaagaccggcagcagactggatgaaacggatgtcctctatctgttttaccgcagctgacacggtcttattgatattggcagtctcgcagttgacctggcggtttacgctgcccctcatctccttgacaatgcggatattctccagctccataagggataccggagcctccatcacgttaaggatgtccacaatctgactgccctccttgatatagaccacatagtactttttcctcggcactatcttggcctcgatatcaaaggtagcaatgatgtttttaagctgttccgccttcggctcggtgggacacacgatttcaaagtggtagaacttctccggggcgctgatggaaccggccgccaggaaggcgccacgtatgaaagcccgtctgcagcaggcattctgaagaactacattccgaatcagggaaaggttttcaccaatttcaccctgggaattaataagcttcactgcctgcaggaccttgagggcttcctcatgttctctgactgctacgatgtatgtcctgctccgcacgtgattcattccactgcgaatcgagacatccgttcttatattaaatgtttttttcaataatgtaaagtactttcttgcaactgccacattttccgtatggatttcaatccaaaaacggtctgaggccgatatctttaccctgccgcacagactcaggatagctgctgtttctgctatctggcagtggcgagccccgggcatctgcctggacagctcgtcttttacgttggaagaaaatgacatgtccgctacttccttttattgtctttgtcgatgtccctgtgttctattttgatgccgtattcggccttggcggtcaggtggccgcaaagggccctggcaaccgtcacggagcggtgcttgcctccggtgcatcccaccgccaccaccagctggttctttccttcattgatataattaggcaggaggaaatccatcatatcatagagcttgtccaaaaactgcgcgcaggtgcctccctgcatcacataatcccggacagactgatcctcccctgtcagctggcgcagttcctccacatagtagggattaggcagaaaacgcacgtcgaaaaccaggtccgcatcctccggaatcccatacttaaagccaaaggagaggactgtgacgaacatgttgcaatactcctggtgtttgaggaatattttctccagttcctgccgcagctccctggtaagaagcttgctggtgtcaatgatgaaatccgcatctttcttgagaaaggccagcttgaccctctccttttcaattcctttgtccagcctgcctgtcccggccaggggatggctgcggcgggtttccttgtaccgcttaatcaggaccccgtcattggcatccaggaacagaatctggtaatccatccccagttccttccatcccctgaaaatagcatccagctggctcagttcctcgccgctgcggatgtctatgcccagggcggcctggctgatgtcactgccggccgctgccagctgggcaaatttatccaccagagatatgggcaggttatccacacagtaaaagcccaaatcctccagcattttcagtgcaattgtcttgcctgccccggacattccggttacaatcacaagcttcatccatcctcctcagttacgtaagattagcatttcaaatcagaattccccccagcgcttcacttccatctcaagctccacgccggattgttccatcaccgtctttctgatatgaccacaaagggccatgacatcggacgcagtggcgtttccgccgttgatcacaaaaccgcagtgcttctccgataccctggcaccgcccatgccgtatcccctgagaccggcatcctctatgagcctgccagcaaaatatccctgaggacgtttaaaggtgctgcctgcgctgggatattccaaaggctgtttctccctccgtctggccgccagttccttcatccgggcctcaatggccgcccggtcccccggttccagctgaaaggatgcctccagaaccgtatatcccctgtcggggatacagctggtgcggtatcccagtttcagttcatcccgggaaagctccagcacctctccctcatttgtcatgaccctggctgatttgaggatattctttatctcagatccataggcccccgcgttcatcaccagggcaccgccgacgctgccgggtatgcctgcggcaaattccataccggtcagaccgtgttccagggccacgcgggccacacgggccagcagttcacctgcccccgcacgtataaggtttccctctgccccggcatagcaccagtttccttccatcgcaatgaccacgccctcgattcccctgtcgctgaccaggagattgctgccatttcccagcactctccaggaaataccgtgttctctgcacaggcagataacctttcccagctcctcttcattgccggggcacacataggcttcagccggccccccgatgcggaaggtggtgtggctgctcatgggttccatgaaacggcacgccgccccttctgatacaagcacctctttcaacatatgttccagattcaaaatacattcctcgcttaagacttaattttcctggccctttccaagattggcctgtacccggttgtaaagctcctgggctgcattgtagcccatcttcttctggcggtagttgacagccgcggactccacgataatggccagattacgtcccggacggatggggatggtgtggcagaccacctggttgcccaaaaattccgtgtactggtcttccaggcccaatctgtcgtactccttatccttgctccagtcctccagcttgatgaccatgtcaatggactgggtatccttaacgctctccacaccgaacagggtctttacatcgatgataccgatgccgcgcagttcgataaaatgcttggtgatgtcaggagcgcttccaatcagggtgtcatcgctgacccggcgtatctccaccacgtcatccgtcaccagacggtgtccccgcttaatcagttccagggcagcctcgctcttgccgatgccgctctcgcccataatcagcacgccctcgccgaatacgtcaatcagaacgccgtggatactgatacagggagccagcttcacgttaagccagcggatgatttctgccatcagggcagaggtggtcttatcagacacaaggcagggaacgccatagtaattacagaattccaaaaggtcttcatccggctcctggtcgcggctgaacaccagacagggaatctggctggatgtgagcttatcgtacatccggcgcttctgctcctggtccatggtattaatatatgcctgctctacgtatccgatgatttgaacccgctccctgtcaaaatggtcaaagaaacccgtgagctgcagggccggacggttcacgtccggatgggtcagcacaatcttgtccgtgtcaatctccggcgtggtgtttttaagcttcatttttacgattaattccgatatagttactccatgcatgataatacccccttgacctggttttacttctcgtttaacttctatcatactatcataatttgattcggttgtcatgtatttttatcattgtgtttccagattctggggagccatttcaatcccgtcatccgggtttgtggcggccccggtttcagtcccgtccggccgcggatggaagtagcggtacacggattcggccgacctgcggttcatctggggcgtctgctccaggtcttccactgaggcgctcctcaccgcctctatatccttaaagcggcgcatgagggcctttctcctggccggcccgataccgggaatatcgtccagtatggattttacctggccctttcccctgaggcttctgtggtattcgatggcaaaacggtgcgcctcatcctgaatcctggtgatgagcctgaacccttcggagtgccggtcaatgggcacctccacattgttataatagagtcccctggttctgtgattattatccttcaccataccgcacaccggaatggaaagccccagcttgccaaggacttccagggctatattcacctggcccctgccgccgtccatcatgataaggtcaggaaatctggtaaaacttcccaggctcaaatcggctcccttttccttcagttcctccgtttccctcatgccatgggaaaacctgcgtgtcagcacctcttccatggacgcgtagtcgttggggccccggaccgtcttgatgcggaattttctgtaatcgctgcgcttgggcctgccgtcctcgtataccaccatggagcccacagactccactccgctggtgttggagatatcatatgcctccatgcgccggattcctccaatgccaatgagctctccaatctggttcattgccccgatggtgcgaagctcctctttcttaatccgctccttatcctgggacagcaccagagcggcattcctggccgccagctccaccagacgttccttctctcccttttttggaaccaccagccttaccttctgcccccgtttggcggacagccactggctgatgacctcctcatcccccagggggtgctggagccacagttcccttggaataaaaggagtgcccgcataaaactgctttacaaagctgtccagaatctcgccctcattttccgccgttgcagccgatatatggaaatggtccctgccgatcagtttgccctcgcggataaagaacacctgtaccaccgcgtccctctcatccctggccatagccaggatatcccggtcctccatgccgctgctggttatcttctgcttctgcgccacctgcttcacgctgtttaacagctcccggtactcaatggcccgctcaaactccaggctgtcggaggccgtctgcatcttttcctggagactctttatgagagggtcgtatctgccgtttaaaaagtccagggcctgactgaagttggactggtattcctccctggaaatatatccctggcagggggcgtcacactgcttgatatggtaattgagacatggacgctcctttcccgtatcctttggcaggttccggctgcaggtcctgatgcggtataatttgtgtatcaaatccagcgtatccttcacggcccccgcgctggtataggggccaaagtaacggctcctgccgtccttcttcatatccctggcaaacaaaaggcgcggaaaatcctcccccatggttgccttgatatagggatagcttttgtcatcctttaacatggtgttgtaccgcggcctgtgctccttaatcaggttgcactccagcaccagggcttccagctcggaatccgtcaggatatattcaaaccacgcaatgtgggacaccatctgttcaattttagccgtcttattcctgctgctctgaaaatactgcctgacccggttcttaagactgatggccttgcccacgtatatgatctcatctctgtcattgtgcataagataaacccccggactggccgggagtttcttcagttcttcctctaaatcgaacaatgcctgtcaccatccttttcatatggctttatgttccgccgttttaccgggcggtgctttaccgggctattcgctcgtcctcttttgccgcttcctccggagtcagcagcccgccgtagtgatagctgacacctgcatcccagagaatccactggtcatagccggcatcgtagacagcctgaatctgctgcctcacctgttcgtcgccatatctaatataatgttccagataggacgccgtaaagtcctgaagccacggccttaccactgcctgaggcgtgtcatccttcgcggatgcggccagaagctccctggaaccattcaatgcatttaatattgtatcataaggctgggtatctggatactctattccaaaatttcccggcccatagtgggatggataaatcatgggacatatataatccagatgctccgccatgtcctcgtattcctggcctacggcagccgcgtcctcttcgctgcgcatgatggcgccgaatacgtcagccgacacaaagagtccttcctttgccagctcatcatacgcatagcttatgaattccgtaattgcctgggtcttattacgcccctgggtatccccatcgtcaaacacaacgtcattcatggtcctgtccacggcaaatcggatgtaatcgaactgaatttcgtcaaatcccacctcgcctgcctttttccccacctcgaccagataatcccagacttccttcttatagggatttacccatgcgaggcccttattatcccggtaaattttgtcatccgccacatgaaggctccattcgggcttctgttccgcaagataggggtccctgaaggccaccaccctggctatggtatagattccgtgctccttaagctttgccataagagccggcatgtcccggataaaaacatggcaggcccctatctcatttaccgtaggggaatccatggcataggtaatccttccttggtcgtcctttacatcaatgaccactgcattgagctccgtcctgtcgagctcctcaatgattttatccatcatatcgccggttccggccacataggcggacacatagatacccttaacctttaccgggttcctggggggatatgaggaaatggtaatgacctccgaatcaaccgcctccgcctcctgggtctcctgcccggactgtgcctctgcttcctcaggccgcgcggcttccttctgggacctggttatctcctttgccggttcataccgggaacatcctgtcaatgcaagaattaatatgcctgctgctatccaccttttcatacgtaacctctgtctttcccaattatcttatgattcctggaaattcccatttccattcttaatctatatcaaaaaggcaaatgcctgtaagttcagtgaatcagacataaacatccgttcgttcccactataataccatattcttcctgttttgtatataaaatatgacttttttgttacaatttcattaatttctcccacttcttgtaaataccaatgtctgccttcagctgcacagaacgcccgggcaacggctgtatgccattgtccgggcgtgcgccgggccggcctggggccggaacccatatttttataaacccataatcctctaaatccatgttttataaatcaaatatgattatgcctctgccaggtgtttctgaagggcagctcttacagcacccctgcctgctgtcatttcagcgaaaatgctctccacatattcgcccagccctgcctcatacaggtccactccgaatatcttggcatcgcttaaaataggctgaagcacctcgtgtacattacaaggctcccctaccctcacaccctgcagcttctcagccaggccctcatacattgggtcagggctcacggtgaaggtattgccctcatcgtctacccctaacaggtaacggcaccagcctgcctgaaccataggtatgaacttaagggacttcacatccagctcaggccttgccatatactccttgatggtttcaccgaaacggatggacagcttctgggaggtatcgcatgcaattctctggggcgtatcaggcataaatggattgggaactcgaatctgtaatacctcgtcaataaatttcttaggagaaagtatgccgggatccgtaaccacaggaagtccttctttataaccgattatttccaccagcttcaccaggtctgcatccttcatctcctcgctgatcttggtgtagcccaggagacagccgtatacggccagggtggtgtgaagggggttcaggcaggtgcacaccttcatgcgctccaccttttcaacggtatccctggcggtaaacatgacgcctgccttttcaagcaggggacgtccgttggggaatgcgtcctcaataaccagatactcagcctcctctgcatttacaaaaggagccacatatgtgttcttgctggtgacaatgctctctgtatctgtgaagccggcctcctccagcattttctttacgctgtcatccggacgtggggtgattttgtcaatcatgctccaggggaaggaaacatgagccggattctcaatatacgccaggaatcccttgtcagccttgccgttctctgtccatgcctttgcataagcgtccacagccgcgtacagcttatcgccgttgtgggaacagttatccatgcttaccagcgccagcggggccgccccatgggtatatctccagtaacacagggctgccagcttgccgatataactgtctgcctgttccgggccagcctcaaagtcagcctttacgtccgggcggaaggaaccgtctgccgaagtgatgctgtaacctttttccgtaatcgtgaagctgaccatctgcagcgtcttgctggcaaagatatcctttaaacggttccagtcggcctcatcatggcggtccacggtcagggattgtgcaaggcttccaatcacggtcttttcaatggtaccgttggccttcagtgtgaccaggaggcttaagtcatcctgaggcctgtatgccttcttgatgatttcatagtcataaccttccgccacaatgatgccggtcttttcaacaccatcgttcagcagcttctgctgacacgctgccggaaatgcgcggaagatattgcctgctccgaaatgcacccactgcggacactccctggtagctgccttcatcgcttccctatcaaattttggaagttctattcctgctgcttcccactcttccttattcctcagttcactgtctaataaatgcataacctttccctcctgtgctcgttgatttcatgatttaatattaccaccccgcgggcgaataatccatatccctttttgtttaatacattgcaaaacttgctgtcagcatccctgtgatttgttaaaaacaatggagcctgcttttattgcaataaaaaagaccagcaaccgtgccggtctctcctcataactgctgaacttcaaaaaatactgcttcgtcactgcatcaccgctgatactgtatcaccgctgatacattggaattctctgtccggtcgaacaattcatccccgtcagccgccattgcgttcaccaaaatcagcattgctgccagcatggcccatgcaaagccgcccagtaccttcctgactttcattctactctgcctcctggattcataagcctgataactgaagattacacgcttagtttcactccgttatcccattatacaaacttttatgaaaaaagcaagtccttttccccttacactgtcttacattttccttaaaagccctgtatttcaacggactttcctgttttagaatttttttccataagggggaaatactctgattccagcgttctttagatagattctaaggaaaatgcagggcaatggggcaatggattctgtccgcctgacatacgtccgttccctctccccttacggctaaaataaaatttttcaccttttttgtaggcaaattctgtatatccggaaaatgagccatttttttggtaaactaaaattaccttatttttctatttatataatatacacgtaagaaaagaggatacaccgtgattacatatgaacctttttggaacacgctcaagaattctgatgaatccacctacaccttaatctataatcataacctgtcaagctccaccatagacaggctccggaagaacaagcccttaagcaccacgacgctcaatgacctctgccgcatcctggactgcgacatcaatgacatcatatcctataaacgttctgaaaacgaccagtttttatagaagtcagcaactgttatcaggaggcagacgggcggatcggccgccgtaccaacggttataaggcccgggccgggcgccgggctgtctaagctatgaaattggcgaggaggaatccggcgttgcagcctggattaagcggtgggaaagcgaggaaggccttgaaatagggcggccgcaatcccgctggctttagcccacatcattttcggaggcaagcccacgcctgaaaaaataccttattacacaacagggctggccagctccttgcccttcttgaaatttataaattcctcaggggacaaaaaaacctcgctgtatcccagttcatggcacaatctggcggctccgggctgctccagatatgcctgctccagcatattcttctgtccaaatacagccctggtatccccgtccagaagtacattcccctttgcaaatacaatagcccgctcaaacgtttccgccacaaaatccatatcatggagaatggaaataacaattttgtgttccctgttaagcgccttcataatggccttaatcctctccttgcccatataatcctgggcaatagtgggttcatcaaatatgaccgcatccgtgtccatggctataattgctgcaatggataccatttttctgtcggagagtcccaggtcatagggatttaccttttcggttccctccagtcccaccatggctaacgccttttgggctgatgcttccgcggcctgtctgtccatgccaatctgcaggggcccgaacatcacctcatccattaccgtattcttaaatatctggtcattgggattctgaaacaccagtccaatgtcctttgccaactgagctgccgtaaaacccgacaggtcctagccattaaacagaatgttcccctgtgtaggccgcaaaagtccctttaacagtttaacaaaggtagtctttccagccccattctgcccgatgatggcagtagggcgctcgtcaataacaagattgattccttttaggatttcttccttttccgtatatgaaaaatgcagcccctttatgtcaatctggttcataccgtcccctcctgtccgtatgtaagaagcgcgcctgcctcttccagggtaaccggatattggcccttctcttttgtctttattccaagttcccggcatatccttgtataggaaggcgcgattacaccatgttcctttaaatcattcctggaaaatatagctccgggtgcatcaaaatccaccagttttccgtcatccagcagcatgacccgatcgctgtaggctgcaattttctccatcttgtgttctgccataatgatagtgattccctgccggctcagtctctgaaccgctcggaacacctcctcgcttccctgcgggtccagctgcgaggttggttcatccaatatgataacctcaggctccatggcaatgatgctggcaatggccatcctctgcatctgtccccccgaaaggtcaaagggcgccctgtctttaaaccggacaatatccagttcctcaaggcttctgtcaatgcgccgtatcatctcatcccttggtatgccgaaattctccagaccaaatgcaatttcctcatagacagtcagtttggaacccgtcacctggttaaatggattctggaacacgattcccaccttccggcataagtcatccacctccacatgcctgacctcgatgtcatccacaaagaccttccctccgtatgcacccctataaaagttgggaaccagtcctgtgagggcctggcaaaaagtactcttacccgagccattccttcctataatacctatgaactcacccgcatggatttcacaattgattccgtccagggcaaggcggtctgtgtggggatacctgtatttcagatttgttacttttatctcagccatgtcataatcctccaaccaattgctcccacaataccaagaatcagaaatccctgaatcaccttgtccagtgtggtcgtatgctgttcattaagaaatgtcttcctgttttttgcattaaatccacgcacctcaagcgcaatggcccgctcctttgtatctataaaagagctcataataactggtgaaatcagaggaagaaatgccttcatcctcaccagaaggttcccctctgtttccattcccctgcttttctgggcatccgtaatggttgccattttttccgtcatctgcggaatcaattggaacaaggaaataaacacatatccaaatctgggcgaaaatcctctgcgcacaaagttctcaatcatgtcggacggtttggtgcaaagtaccagtacgcagaagcaaaggatgatattaaacacattaatggcgatatccagagcaaacataagaccttctttatagaaggtaagcccccagatgccaaagagcgctgtttcgttcccagcccggaacaatccctgaatcagcagcacggtgagtaccacaaaaccagacacacctaagataggtatggtttttcggattacaccggaaccaaacagcagcaatgcgcttaagaggatgaatcccgtgctggccatatgattccccatgaaaatcgggatgaaaacagcggacagaacatacagaatcttgctttcaggcgaaagcctgtttaaaaaagagttcttttcctcatataaacttatacttttcattcatcttctccttagtccagactttctattttgctgttgctctgatacagggacagaatgctttttggaaatcctctatagagtcccgccaccagcaaaagcaccacgattttgtccggaaggtccaccacgatttcatccgccgtggatgcaatccaggctggaagcccctgagacaaggctcctgcatatacaatgtctccccacagattacctgttgttcctccccaaaacatcatgttcaggggggtggatacgataacagcagccaggcctgccagaacaccggttaagatagtccccctcaggtttttcatccgaccataatacgacatcagtcccaccacaattccaagggccgcctgtgaaagggcatatactgtagatatggggtccatggtaaggccatatatcagattgttggcagctcctgcaatcgcccccacaaccggaccggcaagacaggctgcaaggcaggttccaatggagtccagccaaagcggcagtttcaatacgccggcaaacagcttaccgatataattaatccccactgcagcaggtatcagtaccagcgcggccgtattaaatttcagggaccaggggctgttataatttttttctttcatcttcccgcctcctgttcacggactttttcttccatgcgcacaatcgtttccagggccagaaggatttcattcttttctccctctgccgcctggtaaatgccctccacgtatccattgatttcctcctcaagattcccctcgaacaggctgaccgtattcaggacggacgctgtcttgacgcctcttaacgcgcctatggtgaacagcgccgcagtctccatatccgcacctaatattcctttttcatgccagtaggcgtcaatctcatcctcccggtccgtataaaagctgtcatggcttctgcatttacctatacgaaagggaaaatggaatgttttcgctgtctcaaccatgcacataagaagctccgtatcaggcaccgccggatactgctcctctacataggatctggaagcgccgtcatcccggacagccccatgaatcagaagcaggtctcccatatgtatatccttctgcaaagcgccgcagcttccaatccgtatcatattttttacgcctatgtgatgcagttcctccaccgcgattcccgtggacgccccgcccattcccgtggaaacggccatgacccggacccccttatagataccgctgacgcttttatgctccctgttaaatgcaatctccttaacatcctccagaaatcccttaatccgttctacccttgcagggtctccgggaaggattgcgtaggctgcgccatcctgcctgctgcatctgatatgcggctgtaaactatccatactgttcctcctaatttctttctctgttcagggcatcgtaatcctttatggcaatattccccttattcagttcaataaggccctgttccttcagttgttttaaaatgcgattcacacttcgctgggtcactgccatcttctggctcagtatttcagatgagaccacgaagcgcagtttaccgtctgttcccgcattgcctaccaggtactggcagattctctgcttcagcgtataaagggtgttctgccccatattcgcacacatccggtaagaattgctgcacagggtccgaatcatatattcattgaagttattgtccatgcgaatccatttgacaaaataggtccggtccagctccagcatggtcacatcacccctggcctccacacggcttatatagccaacctgggaaaacagttccaactctcctatgtaatccccttttgtgtaggtacacaaaagatacttcttaccgtgttcagattccacatagatatccgcatagccagaggctacaatataaaatgtattgtatatctcaccctgtttcagcacgaaccggctatccttgtatttccttactttaaaattccgcaggatctcataaggacactgccgcagaagctggaacagcactttatctttttccacaagttccagtaacttcaataaattttcatccatttttgtattcctttcggccggtcatggaattattatatatgaaaagcaggaataaagtataggatttatgtctcctaactccttcttcctgccagtctttttataaatgcagatgcaatcattggacaaatgtccttttgcattttcccttattcatatataaaaccattcagtccatagacaatcccatttccggaacaatctccttccatccgcatgcccgggtgggaaccatatacccttgtggtaaagacctcccggccttcgtttacaaatatttccagcgaagtggtgtctgaaaaaatatgcaaatccgtaagcctctccagcgggacgctccgtctggtcctgccgcttccgcaggttcccatatccagggtcagcaaaccattttcataggataacgtcacatctcccctgacagtcaggcacatgtcatgacaggtcacaaaggatatgcgtccttcaaacacaagccctggctccacgcccttgtcaagttcctcaaaatcgtaatcccttctgtccctgcgaagctccctcatctcctccagaggctgctgcaaaaggcgtccttccctcatatggagctgccgcggcatggtaagggcatgctgccatccggcgttcaccgtcggattggtgtaatccgcatccggaatccccatccagcctatgagaatgcgccgccccttttcatccagaaaggtctgaggcgcatagaagtcaaatcccctgtccaccattccaggcagctgggatttcagcttgcaggtattttccctgaaatcatagtccaggcagaaaaccgtacactgatgcacattctgatactctgttcccattggcttcacgccctgagggcagcagaccagacagagctgtccgtccaggcagaacaaatccgggcattcccacatatagccaaaggttttgtccgtagtgattctattaaaatactcccatttttttaaatccattgaccggtacaggaggaccattcccttgctgtgcacatcccttgcccccagtaccatataataaaactccccttctttatacactttagggtcccttatgtggcagctcatgtcatccggataatctccgtgattcatcaccagttccttggcagaaaaatgatacccatcctggctggtaaaatgaatggtgttgctcacccggccgcccatgatataatcgtaatcatcccggtcaaacagcttcacattgcctgtgtaaaaatagtggatggttttgtcctccacataagctgaaccggaatatacgccatgggcgtccatgtcctgatccggaaaaagcaccggctcctcctgtttataatggatgaaatcccgggtggtatagtgaccccagagcttaatctcccctgtaggctcaaagggtgtatactgataataaatatggtacagtccctgaaactggcagaggccattggggtcgttcagccagccggtttcaggcatcaggtggtaggccagacggctgtcatccgccttgaccatttccctgtactccctgttttcccggtaccatgcctcatagtcctcccttcggaccttttcatattttttcaagctgcttcctccttaccgtcaccatgtgtttacgctgtcttcatagcctctgccaccgccatgcttattctgtcttcactgcctttaccgccacatttttggcatctgcctgttcaccaggatatacggtcacatccagatttcctccctcaggcagaatcatcatagtctgcggattcattcccttttcccgaatcagatccaggtcagcggcaataagcttatcgcccttcttcaccttatcaccctgggacacaaatgcctcaaacccctgcccgtccagctgtaccgtattgattccgatatggatgagcacctccacacctgtctcagatgtgattcccaccgcatgctttgtgggaaacagcaggcttatggtaccgtcgcacggcgcacataccatgccctccgcgggattgatggccacgccgctccccagggccttggatgcaaacacctcatctgcggactgccccacatccaggatctggcctttcatgggaacgtaaagctgggtgacgatttcccgtggcatttccatttccgaagcctcttctatttccccggccctgcttcccgtccttttctccgttccgtcctgctggtcaagagcaaaccttttccagaacaccatggtaagggcaaaggaaacgcccatggacaaaatgattccaatggcaaaattcatatagtggtcaggcttcatggagataaagcccggaagtcctgctgcgcccaatgcctgcgccagtgtcttggtggccgccagataggcgcttcctgccgccgaaccagccatggctgcgtaaaatggatacttcagtttcagtgtcacaccgaacatggctggttccgtaattcccaacagggcagaaatgccggacgcggagcagatggatttcatcttgtcattctttgtcatgagaagcactgccaggaccgcggcgccctgggccacattattcatgcttgcagttgaaaaaatgaagctgccgcctgtatgggcgctgtcagccagcagctgtgtctcaatggcaataaagctgtggtgcatgccggtcatggtaataggagcgtatgcaaatccaaagagagctccgcccacaggccccaatgtattgtacagccatgtgatgcctgcggccagcagattaccggcttcccgcagcacaggtcccacaaagataaaggtcaggaaagaggtcaccaggatggataaaaggggtgttgtcaggttatccagccaggatggcgttaccttacgaagccgtttttcaatattggcaagaatccatgaaacagccagaacaggaaggactgttccctgatatccgatggcggctatctgaaaaccaaagatgtcccaaacaggaggctgtgccagtccaatctgatatgcgttcagcaaatcgggatgaaccataatcatgcccatggccgcgcctaaaaacgcatttcctccaaacttcctggttgcgctgaagccgatgagtaccggcagaaaggtaaagggcgcgtttgcaaaggtattgatggccgaagccagcccctgccacatggggtacagcgcaataatggaccgcccgtttataagcggtgaagtcagcaggttgttaaggcccatgagaagaccgcctgccacaatggcgggaatgattggcacgaaaatgtcactgagcattttaatgaaacgctggaccacatttccctttccctcttctttttcctccggcttttcctccaatgttcccagctgtttctgcacttcatcgcagaccatgttcacaataccggaaccaaatataatctggaactgggattgtgtgagaaacactccttttaccccctccaggtcgctgattgcctcttcgttccgcagcccgttgtccctgagctgaaaacgaagcctggtggcacaatgggtaactgacttaatgttgtcttttccgcctacatacttgatgaccagacttgccgtctttgcataatccatcatattcccttcccctcttcttactatgttttccttcaatgttttggcatcggttccacacttatataatagggcattcaatctataaagtcaatattttattggtaccgattccatttttatacgtagaataatccccctgaaatttgttcacttttcacatatctccatcattttcaccctgaacaccagaaaatccctttatttcttaacgcttccgccttcaattatcctgtaatccactatctgtttctttggcaccggttcccgatgtatcatcttaagaatggtttcagctcccagatagcccaaaccataggaatcaaaacgcagggtggtcagctcaggctttaacagggtgctttcgtcatatccgccaaatcctgccacggaaacatcctcgggaatcctcagccctctctcccccaaaacatggtacgcgccaaaagccaggcggtccgtggcacatatgattgcgtctaccgggccctgatccagaatttcctcagccatacaaattccgctggcatagctgtaatcgccggtggccgtgaccacattcttaacgccgcactctttcaggccgtccatcacgccctgcttacggttgagccccaccgccacatcaaggccggacactcccatgtatccaacccgcgccggagcagcccttcccacacggactcccatggcctttcccgccccgtagtcatcgtggacaatggatattcccccgtcatattcctgggccgccacgaccacgggcacaggactttcctgtatcaggtttctgtgcgcctctgttatggtaatggcgctcagtatgatgccgtccaccttcagcgtaatcagtctttggatattcttaagctccaggtccacgctgtggtccgagtccttaatcagcgtttcatacccctgctccctcaggtagcgcccgatgctggtcaccacccggctggacaccttggaattaagggtgggaaggaccactccaatcacattgctttccttggcctttaacctggcaaatgtattgggctcataattatactcccttatgatttcctgaattctttccctggtggattcctttacactgcctccattaaaatatctggacaccgtactcttggtaacccctgccatatttgcaatatcatccatggtaatctttcttgatgacatatccatcccttcactttcattcgctgtgcgttggtttgctgtatgctcaataaccgtgtggccggctgcgcatcgtatgccggctgtacgtgggatacaacagacgcagactcccagtatgccctgtaaaacaggcatgttgacagctgcgtccgcctccctgctatctcttattcattagtatatcaaaacctcggcattctgtcctccattattgtaaaattaccgcggcctgttttcataccaatcctttagataatctgacttccgaagggcatcaaagccagtttggccagcttgaactgctgtaacccaaaaggtatgcccacgatagtaatgcaaagcagtaccccgatgatagctgactcaatggccaggggcaaaccggaaaccagcagccagataatattaaggagcagggagcccgctcccccgccgtagaccacttcctttccaaagggaaagaaactcaggcccgcaaatttaaagcattgtagccctaccggtatacctatgatagttatgcaccacaggcagcctgtcagcagccaggacaggccgcttatacatccgccgaatataaaccataatacatttccaagacatcccatatatcttacctcccttcccgctctgcttccagtgtctgcctcatctcctggagccgtttccgaatacagcctacctgccgtctggcttccctgacctgattcagggcatcccctattttggactgcaccatccagtcagctatgactccgtcaaagaagtaatcggcaaaagtcagaaagcttcccacatccatctttaaatccccggtcagatttacatccagcaattctttctttaacctgcgcagatgtccccttgcctcattcatggctgcctgggcttcatccatccggttatgcttaaacatggtactaaagaatcctccgcccagcatatcccagattccccagctgcttgccttctgcagctgttcttccgccttttgcaggctcatggatgccatatccgctgccatcaatgcctcattgatttcctgttgtctgctttttctctccatcctgttctcctttctgcgataaacaataccttgctgttgtgcgaggcaggtattaccgccagctttgcatcagagaaaaaaagacctttatggtggctggctccctgccacaataaaagtcttgcacatttcattttatacgggtgcccctggcaccgagatgacgatttaaaatccaccttccggtggttcgctactcccttttattggaactgattatatcatgctgtatattgaatgtcaaatacgataagttgaagaatctattacatttttctggcaaaacagaattctgaacattttatgaaacgaatggtaaagtaatttattataatgaaccaaaaaaccgaactcccatgaaagagtccggtttttgactgatacaatggagcatacgggattcgaacccgtgacctccacactgccagtgtggcgcgctcccagctgcgctaatgccccagcactcgtagataataccataaatccagacgaaaatcaagtactatttttccaattattcatactttttgaaaatagagagattcgtaaataaaaagtcaactttctcccttttattccttaaggaattttattcttaatttagctcctgctcaaacttttgtcacaatttccttgtatactctttttcataacaaggaattactccttttgatatagatttctctcatacttagccggcacgattccttcgtgccggctcctctcatattcaggcgccctctattttcctgcctgttttacccgaaacacccaaaagatactttattcaccttattatcccctcgttattgacattttcacacattcctaccgacagcatattatacgttagaagccagacaagcttctatataaatcagaaaaggatgtgtatttatatggcttatccaaaagttcatatcgtcaactcaactaatttcagcgtaaagggaaaagtgaagtacgcctctgccttttgttctgatgacaattatgagatagctccatgggaaagctggaccgccggcagccgcggagtctgcctccttacagaagtatccgccactgtccacactccgggccatgataccaaggcaactccctatgaatcctcaggaacatcctacagtcagtttgccgtacttcaaacagaacccggaaaattcacgatgacccgtatcgtgacctaacccaaatgccagtgcggcttatgccgtgctggcatctgatattctgccgcatcaagcttgccgtacctgatatctccatccatcggtatcctgtcttcagcgccattccatctgccatcaataacagtagctgtgatatctggtcctcagatattctcccttgccctgtctgccgcctgactgccagaccacatttcccggcaggatgcttccattttccagaagccacttcgcattggcccaattgcttgctgtgggttcacgatagtaattcccgtccctggtgcaggaatactgccccggtgcaaatgccacgcctttgatggtgttgggaaactggccgtgattcaccctgtttaataccacggaacctaccagcagctgctcatcatccggacagttctgtgcctcaccacagattacatgagccagtatataaaggtcctcttccgaataggaaggacgccgtatctcaataccggagagacattttgtttctatatatgcatgtccggcctctgttgttatcattgaccaatcgccgtattcgcccaaaacctcaaaggaggtattcaaaaatgcctggtccaaaaccactgcctctgtgctgggctcctgataaatattgattccatcctggttagcaaacttaattgtcttatgggccgcgtcctgaagagcggttttgaatccactcaccacgctttttgcggcgagcaccatatctgtcccgttttcttctgcctgcacggtcattggcactgccagtgatatggtcagggccatggctcccaatataacgattcgtttcatatctactccttaaaatgtttgaactgcctgggcaggatactcgccacctgcccatggtatttgttctctattatattctgtcccaaaattagcaatccaaacatatttaaggtaattaatggcaaaaaaaagccgccacaaagtgacggcccaaatgctcatccgttcttaagaaatcatattcacgggtctgcaacctttcttttatttgtcctaaggtcatgcaattctcctttttcagtatcatttatgccattatagcaggactggtgaatgaaagcaaaccaattaggggctgtggacaaaagataggtacagataaatgcagacagatgtgaaataatgaaaatgtgatcatgactaaaagtgaaacgagtacccgcacctgcactcaatctctcctgtattgtaaatctcgcctttcaagcgctttatatgcgccttccttccacataggggacatacaaaatccgcctccccatatccgtcggtaccctgcaatgcctgcagggacgcccttatgaagcaatatagattttcaatggtcatctcctgttccaggttgaccccgcaacaatcttccatttgtatacctcctgcctttttttatcatgatgccgggtattgcttgattcaaattctcctctgtggcaggtcccggtctggggcggattaccatatccggtgtatgcctccaaaagccagtcctttgagataccctctttgaaaataccactatgaaaatgcctgccgcaaacctgacggcaacagtatacgctcctttgaaaaatccaggaaggatacgctgtaaaatccatcctcttcctcgtccgcggcctgggccttatgccagatatccagcgctttttgaaccgttatctccacatcatggtaataatagaggttagcgctggtatgggccacaacgtccgcaatcaaaagcctggcatcctggttctcaaataaaacttcattcagattgtcctttgtgattttcatatggctgcctcctgtattttatagattctgtttaacggttgctgtttaacggttttcccatcttaggtccccggcaaagaacatatgttcttttatgttttcataataccacaaacgtacgtttgtgtcaagacagaaaacagctcccggcacttacagacagtaacctgcaggcagtcataaatcatggcaatacgcgtccccttttcctgctgacatacaggaatgtcccggttaaaccatgaatcactcatacatggccaaccttgcacatatattgtaaaaacatatcatatgaggcttttatgcaaaccataacccagcatatcctgacagaccagatggattaccagaattccgttgtactcaactgccagatccgttacccgcaatttaataatgcttcctgcaatcaggaagctcttcagaccataaaccaatattatgtcacacaggcaagcgaaaaaggacggtactgccggactgtattgtatccccaggcagccgaagaggcaaattacagccgtgaccgcagctttccattttttccgtatgaattcaatgtaagctacgtggtaacttatagccgggactgtattttcagtctcttttcggaacagtatacctttacaggcggagctcacggctccacgctgcggacatctgagacctgggatgccgaatccggcagacaaatgacgctaaatgacttttattcggataatccttcttatatccatgatatccagaattggatccagcttgagattgcggagagactgaaagccaatcccggtacctattttgacaattatccccagctcctgcgcaattccttccatccggaaaatttttatatgacgccagagggaattgtcatttattaccagcagtatgatattgccccttattccagcggcataccggaattcctgctgccttttgacgcaaatgtatctgaatcctgagtatctgaatcctgacagccaaacgagcgtttccggccttccggcagcctcccggaggccatagcagggaagccatggcagttccttctgcccgttgcctaacccggtctgtgatgctataattacatggcagagggacggacacgtccccaaatcacaatacaggaggaactgccatgaatttcacatataatccaaatcagattgccctttacgatgaacaggacaaactgctggctgaagtaacatttccagatactgcggatggcgccgtagatattgaccacacctttgtggatgattcccttcagggtcagggaatcgcgggcaaactgatggaagccctggcagggcatctgcgtgcccagggcaagaaggctgttttgacctgttcctatgccgtcagatggtttgaaaagcatccggagtatcatgatttaatcaaatagtctctgagctataaaacagccactcatggatgcggcactgtaaaacaggatctgttaattccgggaaacggcacagcttcggctctgccgtttttctctgtccgcctcagaaaagaacatatcagcgggcctggcaaaggttccaaactcaccgtacagcgcctgacagatgaccagaggttctcctgtcctgtatcattatcctgtgtccatttctatataaaccatgtgattcccaaagcttatctctccttaccggagcctcttgtcaaatcatagctttcacctatcatccttttgatatccttatccggaacgcttccatccagaaccaccgtattccagtgcttcttattcagatggtaccctggccgtacgccggaataggcattgcgccaaaattcaatccactcaggcgcgcatttcaggttaatgcagacctgttcctcccgccggtatatccaggcaaatacccgcttattgccccggtgacgtatgacagtccattcgtgatcccggaagggatagtcttcatatacatctttataggtaagacaatatgtaatcaaatctttctttgtcttcattcgttctcactcctttatcaatcagactatggccgtattcattctccgctttatatatgcataaacagacagcacattcagtctcatattcctagattatatcagatttatttctatgaaacaaaacatggagcgtgccgacggagtgtaacctccatcttcacgcttcataccgcggctttagcttaataccacctcaccatgggcagttcattgttcacgcccttgctcaccagtatctgatgaaggtcaatgaccccattgtggaatgcagctgcgcaggagcacaaatacaaatcccacatgcggacgaattcctcgtcgaacatgtcctttatctccttttcatgttccttgaaattcttttcccagcacagcaatgttttgttgtaatggtttctcagattctccacatccaaaatatggaagtcatgttctgccatcagggatatgatttccctgaggctgggaatgacaccgcccggaaatatatattttttaatccagggatctcctgcgtgttccttctggctgctgatgaaatggagaaggaatacgccgcccggattcaacaccttgtccatgcagtccatgaacctgccgtaattttctctgccgacgtgctccaccatgcccacgctgaccacacggtcaaatttcatgccgcctttcggcaaatccctgtaatccatgagctgaacgtccagaaggtgttccagtccttcctcctctatgcgctttttaaaaccgtcatactgctccgtactcagggtgatgccggttcctttgactccgtattccctggccgccctgattaacagaaatccccagccgcagcccacatccagaaggctcatgccctctttaagcgccagcttcttcagaatataatccgttttattcatctgggcctcatagagggtatccttttccgacttaaaatatccgcaggaatagttcatggtctcgtccagccacagcttataaaaatcattgccgatatcatagtgggaggacacctccatcttctggtttttcctggaattcgagggataaaggagcttcctcagatgcaggcggttgacagaaaatcggtccatctgccccaggaaatggtccagggcctcatacaaattcccctccacctccagtttgcccttcatataggcctcccccaatgccagggaggtgctgtccatcagcttcttcaccggtatagtttccctgatgtcaacggcaaacatgggattgccatggcctacccggtcttcgtggtccttccattttaccagaaagggataatccgtaaatcggttcagaaattgaaccattgccttctcttctaacatactggtatcacacatcctttcttccagtattatccccttctggaaacagaatattcaaaaaccccggagagcctaagccctccggggtctgtcattcataaaatatttaaaatctgaccaaagattagtcgttgccgtacagtgcaaccagcttctctaagtaagcgtaacgctccttagcctctgcctcgttacgtgcaaacagctcggctgctctctcaggattcttcatagccaaggacatgtaacgaacctcgccctttaagaagtcctgatatgtctcaagcttaggagccttggaatccagggtgaacttcttctcagctgccgggttgtagcggaagttgttccagtagccgcactctacagccagcttctcctctgtctgagccttgtccatgcccttcttgataccatggttgatacatggagcgtatgcaataatcagagatggtcccggataagcctctgcctcggcaattgccttaacagtctgagccatatcagcgcccatacaaatctgtgcaacgtacacataaccatagctcatggcaatgctggccaggtctttcttcttaacgtccttaccgcctgcagcgaactgtgcaacagcacctgtcttggtagccttggaggactggccgcctgtattggagtaaacctcagtatcgtataccatgatgttgatgtccttaccggatgccagtacgtggtctacgccgccgaaaccgatatcgtaagcccatccgtcaccgccgaatacccactgggacttcttagccaggaaatctttattcttaacaatgtctctgcagacatcgcagtcaacgccgtccagagctgcaaccagcttatcggcagcagtgccgttcagagcgccgatgccaaatgtatcgagccattccttgcaggctgccttcatctcgtcagtagccttctcgttagccattacgctctcaaccttagcctttaagccgtctctgattgcgttctgagccagtaacataccgtaaccaaactcagcgttatcctcaaacagggagttgtcccatgcaggaccctgtcccttggcatttacggtgtaaggtgtggatggtgaggagttgccccagatagaagagcatcctgttgcgttggcaatgtacatcctgtcaccaaacagctgggtgattagttttgcgtaaggagtctcgccgcatcctgcgcaagcgccggagaattcaagcagaggctgtctgaactggctgcccttaacggtgttctctttgaacttagccagaacttcttccttgataggcagggactggccaaagtcaaagatggcctgctggccaaggttagcctcaaggctttccataaccagagccttgttgcccttcatgcctgggcatacatttgcacaggaaccgcatcccgtacaatccagtgcggagatggttatggcaaacttgtagccggccatacctgtcatatccttcatcttcatgtccgcaggtgccttagcagcctcgtcagcggtcatggcaaccggacggattacagcgtgaggacatacatacgcacagaagttacactggatacagttgtccggattccatacaggaaccttaacagcgatgccgcgcttctcatatgcggaggtaccggatggtgtggaaccatctgcgtattctgtaaatgcggatacgggcagggagttaccttcctgagcgcttacctttgtctgaatgttgttgacgaagtcaactacatcctttcttccctgggttacaactgcatagtcaagaccttcgtcttcacagttcttccagctctccggaacctctaccttgtgcatgcccttagcgcctgcgtcgatagctgcccagttcttctgaacaacgtcctcgcccttgcggccgtaggttgcctttgcagcagccttcatcagctcatttgccttctcagcaggaatgatgccggtcagctcgaagaacgcggactgaaggatggtgttgatacgtgttgggcccatgcctgtctcaataccaatctttacaccgtcgatggtgtagaagttgatgttgtggtcagcgatgaacttcttaacctgtcctggaagatgcttctcaagaccttccatatcccatgggcagtttaacaggaatgtaccgccgtcaaccagctcctgaaccatgttgtacttgcgtacatatgcgggattgtggcaggcaacgaagttagctgtacggattaaataggtagacttgattgggctgtgtccgaaacgcaggtgggacatggtaacgccgcctgacttcttggagtcataatcaaagtatgcctgtgcatacatgtctgtattgtcaccgatgatcttgatggagttcttgtttgcaccaaccgtaccgtcagcgcccagcccccagaacttacagtttgtggttccctcaggagtggtaaccaaaggagctccaatctctaaggacaggtttgtaacgtcatccacgatacctacggtaaatggggacttggttgtattcccgtaaactgccacgatctgagcaggtgtggtatccttggaacctaagccgtaacgtccggttaaaaccttaacctggtcaaacttgcttcccttaagggcggcaacaacatccaggtacagaggctcgccgatggcgcccggctcttttgttctgtctaatacggagataaccttaacagtatcaggaatggcgtcaatcagggcctgtacgcagaatggtctgtacagacgaaccttaacaacaccaaccttctgtccctgcttcatcatgtagtcgatggtctcctcaatggtgtcattgacagaacccatggagatgatgatgtgctcggcatcagcagcgccgtagtagttgaacagcttatagtcagtaccaatcttggcattaaccttgtccatatattcctgaacgattgcaggaagggcatcatagtacgggttgcaggcttctcttgcctggaagaagatatccgggttctgagcggagcctctctggcatggatgatttggattcagtgcatgcttgcggaaagcatctacagcgtccatgtcaaccatttccttaagatcctcataatcccaggtttcaattttctgaatctcatgggatgtacggaaaccgtcgaagaagttgatgaatggaaccttgcccttgatggatgccatatgtgcaacaacagtcaggtccattacttcctgtacactggactcgcacagcatggcgcatccggtctgacggcacgcgtaaacgtcggaatggtcaccgaaaatagataatgcatggctagcaagagcacgtgcggatacgttgaatacgcctggcagctgctcgcccgcgattttataaagattagggatcatcagtaacagaccctgtgacgctgtgtaggtggtggtcagagcacctgctgccagagaaccatgtacagcacctgctgcaccagcctcagactgcatctctgtaatctgtacttcacgaccgaagatattggttcttccgtctgttgcccattcgtctgtggcttcagccataggtgaggatggggtaatcggatagatagccgctacatcagtaaatgcatatgacgcatgtgctgctgcatggttaccatccatggttttcatttttcttgccattttgatttcctcctacaaatagtgaatatgtaatggtatacatgtgagtctgccctggatccgggcatgtataaacatgcttcaaccctatgcagactgacctgtctactattatagcaattatttaacaaattgcaaatgcttaatcgaaattacgccaaaaaatacaatgtcaaattttaaaaatgtataaaatgcagcaaaaaaaagagaaaccaatgattcgggtttctctttttctgtctgcttttttattccggtttcagcggtgcaatcaccggattatccccgcccggtccggctgccccgttctcagacggctgtggtacctgggagggatttggcgccgtcccaggcgctgtggtgggcgctgccggctgggtcactgtgccgggtccattctcctgtgaaccgttcccggaaggtatggaggttgcctcatcacccggaatatagccgtccggcattccgtcaatgattggcggtgttgtctctgtggaaagggtagtctcctcaggcgccagcaccacgccggtggtgttgcggcggataacaggggcatggcctttgtatgtggtcttatggtcctgttccctggaaatttcctttccgtctttatataccaccttgtaggtaatccatctgcttcccttgctgcctgcgctcttctgaatctccacacccggctcaagggtctggtcctcctcataagcaggcgccggcggatccagttcctccactttctcggataccaaatccagcttggttccctcctccagaatgggaattccataaatggaaaccgtcatcttctggtccgcgtagctggccttgatgccgatggatgtgctggaggtgttcttgaagcggaaatccggctgttcccagctcaccgttgcatcctggcccggcgtgatatagttgggctcaaatgtatgggagcgtctgaaggtaatgctctcctcccccagacctgacctgtatactgcattgtacagggtggtggatacctggcatacgcctccgccgatttcctgtactacctctccgttgttataggcggctgctccctggtagccctttgcttctgtcctctgtcccaccactgcgttaaaggagaattcctctcccggatgcacaaccgtaccgttcagcgcctccgcagacagcctgatgttggtgtttcgggccttattggctgtggtctttgtggtgaaggtgcttatggtcttatatttttccttggcagccgcggcgctgatatccggcgccgtctcacttcccgtggctgtgatggaagcgtcgaacttcttatccttcagggccttcagtatgtctgccgccagcttctcctggtcaatggcaaaaccatgttcttcccctgcaaacacaaaagtgcccttttccttgtcgtagctgtcaatggaaccgtttttggcctttttattccacttggcggcacagctttccgcctccttggcagccgcctcctccagtccgtccatgctcagagtataactctcggccggctcctggctgtagatttcctccagcagcgcatccaccttttccgccgctaaattcgtcacattatatgtatctccgtcataggtgaccgtcatgctccagggatattccttcaggatcgcatttctggcctggttcttggacatgccggtgatggcgattccatccaccttgacttccttcatcatctctgtcccggttgtctcttccgtgctgtctaccggttcgcttcccccggcgcccttaaacttcatggccagtgatatgcacgcaataaggataataaggataactccggctatggcaatcttcttataatccggccccttctttctcctgtgagggctgttgcgcctggctgtctgggccgcgttcatcctgccggcctgtcctcctgaacggtaggaataggaactccttgaaccgctgcccgacgaactgcttctgcctgtatttctggacgctgcgcgtcccgtgcctttatctgaccccctgccgcggcttctgcctgctgaggagcttcttctgttctgattgttctctaactgattcattctattcacctgtcatctctgcctataaatttattcacagattgtagtataacatactttatgtaaaatggaaccgtcttttttgtttttttcagcccaattttacttattgtgaatttcatgttactatatataaagtaagtattattaaattattaaaaatcaattacaagccttttcgaggtttttacatcttataatttggaggtcgcatcatgtcttacgttgatttacacgtccactcaaatgcatccgatggcaccctgtcacctgaacaggtggtgcatctggcccatgaggccggactttcagccatcgcgcttacagaccacgataccacggccggagttgacgtggccatggaggccggaacaaagctggggctggaggtggtgcccggcatcgaggtgtccagcagctttaaggaccacgaaattcatatacttggacttttcgtggacacggattccccctctctgcaggccgcgctgaaggaattccgccagcacagagaccagcgcaaccaggagatgctgaaacgctttgatgcccacggcatccaccttaccgccgaagaactgtgcgccgggaatcccgacacggtcatcaccagggcacatgtggcaagagcccttctggcaaagggtctggggcctgatttggaccatattttcaagaaatatctgaagtacggaggcacatactgcccgcccaaggaatttctgcccccggaggcagtcatggaagcgctcttagacagccatgcctttgtggccctggcccatcccctccagtataagctgggggacagggacacgcaggagctcatcgcctatctggccggcctgggcatgaaaggcctggaggtatatcactcctcccacaaccgcctggaaagcgccaagctccaggaaatggctgcgcgccaccatcttctccccacaggcggctccgattttcacggcagcaataaaccagatatttccatagggacaggacggggcggcctgcgggtctcctccctgctgttagatgcgataaaaaacaccctttaatccctttttttttatgaaagttcataattgcccttcccctttcgttctgctataatcatatatgttaaaaatttaccagccttttccatttcgggaaaaagcttacaaacacaggaggatatgccatgaagattcagaatatcacagacgtagaaaagtttttctctgtcattgaccagtgcaagggaaccgtggagcttgtatctccggaaggcgaccgcatcaatctgaaatccaaattagcccagtatctgtctatggccaccatcttctccaacggatatatcaaggaattagacctggttgctcatgagaaggaagacatcgagcgtttaatcaaatatatgtatcagggagaataagcctaagagaataagccccaaacaggcaggaatacaggcaaaggcaaagcccggaaccatttgacaggttccgggccgttttattattccaagtctttattcctgatgctcctggtccccattttcctcactgaccgccacgcatacaggctcacaggcagactctcccctgccctttcttcttaaacgggcattgactccatcccttaaaagcgcgtacagaacggaacacagcggaatgaatatgagcattcccacaattcccatcatgcttccgcccacggtcacggccaccagcacccatatggatgggagtcccacggaattccccaccacataggggtatatcaggtttccttcaatctgctgcaatacaaagaaggtaatcgtaaaaaccagggcatccatgggatttaccatgagcatcaggaacacgcccactgccagtcccacaaacgcgccgaatatgggtatcagagccgtaaatgcaatcagcaccccaatcagcagcgcatagggcagacggatgacggtcagcgccacaaaaaacatggttcccaggatcacggcctccacgcactgtcctgtaaggaaattggagaaggtgcgttccgtaagggccatgatatccagtatccgccctacagccggttccggcagaaatgccgccagcaccttcttcatctgccgccccagcgtctccttctgcagaagaatataaatggcaaagataaatcctatcaggaatgaggacacgccgctgacaatggaaacagctgccgaaaaggtggtgttcagcatggttcccgccccgctctttaaaaacgcgaccatgttctgaaacacttcctgccagtccacttccatctggttcatatattccagtatctggggattgctggcaaagacgcgttccgcctcatcgcgtacccccgcaaaaaacacagggatactgctttgaagattcaaaaaagtctttaccagctgaggcgccaccacaaagatgaccaaaaacaggccccctgtaaccaggaggatggtcaccaccaggctgacaggccgtctcagcctgctgccctctccaaacacgggcaaatgcctctcgatattgcgcatgggtacgttcagtatgaaggcaatggccgcccccagaataaagggccagacaatgtgcatcagtccggccgccacatccaccagacgtctgtaattgattcccgcaaccacaaccaccacggtaaagacaataagtcctctgattttttttattgtatcgctatttaattccatcataccatcctttatcattctgtctcttcccggaaggctgcctcaatggcttcccgtcccgcccggaaggtcccctgggccatgaggctgctgcccccgcccctgccgctcaggcggctgttcagggctttgctgagagcgcgcatgtccatccggctgctgcccagggcatagtgatattcgccgtccctgtcatttctggaacacacggcagccaccccggccctgttctcttcatagagaagggtggcatactggcggacctgaacaggtgttaaatcctcctcaaatacaatgagggggtctgtgctttccgggaactgtcctgccttcagggccaccaggctgcttcccagctttccaatcaggaaatccctgtcctggcaatcatttttaagcttttccactgcgtccggcacctggatgagcttggctgacagcaggttggatatcctgatttcatccttcagcctgtccctgtaatccaacagggccctgcggccgcacagcatggacaggcggacgccgcccttgtaatgaatcatgcttcttatcttaataatgcccacttctccggtgttttctacatgtgtgccgcagcaagcgcacacatcccctccaggcacctccacaatacgtaccagaccggacagttcctttttgcttctgtactccatggtcctgagttcttcctcagtgggataaagaaccttcacagggacattggcatagaccagctggttggcctcgtcctccagccggtccagatcctccggctcaatgacgccgttaaagtccaccgtcacctcctcggtccccatgtgaaagcccacattatcgtaaccaaagtgtctgtgcaccagaccggacaaaatatgctccccggtgtgcagctgcatgttgtcataccgcctctgccagtctatgattccctctgccagcgtcccctcctctatgggctgcgccagttcatggatcaccttctcccccctctcatggacggacagcacgggaatcccgtttaaagttcctgtatcatagggctgtcctcctccttccggataaaaaccagtctggttcaggatcaccagccaggttcccttcccgctttcctcacagtgttccaccgtgcacataaacgattttacatagggtgtctggtaatataatctgcttttgtccattctcaaagcctcttttccttttcatctgccggaccatgtttttcctatctttgtcagaaaacggtccgcgcagtatcatgcctgccgacattatactatatatccctgccttgtaccaacaaaaatttactaaattttatcaaattgtggaaacatgagcaagcagggcttcatatgatacagtgtaattaaactttatatggaggaattaacatgagtgatgtagcagcaacaaactgcagttgtgactgtggatgcggatgtggaacaggaggcagcggatgcggatgcaatatcatctggcttatcctgattctgtgctgctgtggcggcggtggcttcggacataacgactgcggtggcggttgtggctgtgggtgcggctgtggaggaggatgcggagatattatctggctcatcttaatcctgtgctgctgtggcggcggtggcggtggcttctgctgctaattcccacctctaagaaatccttcaccaaagaatcgaaggaacagggagtgcttcaccactccctgttttttcttgcggggaagccgggcttacttgccggcctcacctgtctcccggggcgaaaaagggcttttcgtaccccggttcttacccccatacccctttcttccctgtctctgttttaagcattcctcatctatttcatatactgcatttccatctataatcaaacggctgtacatggatttcactctccttccatacttataatatatgcagtgtccaggctttggctcattgtgccggaaaataagtggcatgcaacaggctcctcctgcataaattggaagcaaagaaagaaaaggctggtggaaatacatgaatccatctgatgactataaactaaccgacctggactatctcataggcgaccaccatctgcaaatgatcaaggcctccctcccctacctgggcgttcccgaacaaaaggccatctccctgtttgtcaaagctcaggaactgagaaaaacaatggagctttttgagactgaggaggtagcatccatgggcatctgctccctggaccgtccccagggcaaaggctccctgcgcgacctgctgaaggccatacgtccatatgggaatcccatggagcaggatataattgacatggccgaaaccctgatggaaggccagactcccatggagcagctgcgcaggttcctgacgccggagcagcaatcccgttttgagaccatggaaatgatattcactgccatgcaggccatggcctgatacggccaatcactgaaccccattacagaaaggactacataattatggataacagctggaaacaggaccccaggctcaaggccatgaacaaagataaactggccatgctcactgaatttgcggagcggatcgaacattcagacaaaaacaacctgatggaggtattcatgaccattaacatggaagccaggcaaaagggcgtacagtttaacgacagggagacagaccttctggtcaacatcctcagttccaggatgcctccctctgagaaaaagaaaattgatttattaaaaatgctttccaaaaaaatggcagggccgcgctgatggcgcccctgcctctgccttatggaatcattttaacgtgagtcattttaccctgaatcattttaaccgttccaaatccggcgcaatcacaatcttagtgcgctctgtggctgactgtaccagctcctttgccctttcctggggcaggcggatacagcccgcggagccattatccctggatgcggtaaaacagtgaagaaagatggcagatccctttccgggctcacatgcctcattataattcaatgccagggcataattatagtatggggaggcagacgccatgttctctgcggaattccagttctttgcaacctgtgatgtattgaccagcttgttataatagggactggctgaatcatccacccagtaatcgccttttgcgatcttatggtagggcaggatgctgcccggattttccctgagcccaaaggccatggtaaatccatatgtaccggaaggcgtgctgccgtctccttctgccttctggtccgtaatgccgtttctgcctacgatgccggcctccttccaggccatctcccatgcttcccctgacttcttataataatatacatccgcgccgcagccgccggtgcccactaccaccaccagctggtccgcatcctttgctccttccagattctggggctgtatgattccgttctccactgccgctcccttttcctcaggctctgcttccgaaacagccattactcccggcccctgctccttagggtcaggggctgtacccgcgcctgtgctgccggcagccatggccgtaagacttcccgctgccatcatgacgcctgtcagaaccagcgccgccgctgccctgcctaatactcttctttcatgtctcatcgccgtcacctcaatatcgtgttttgtccatttcctattataacctgcaataacaggaaatgttatttcttttttcttacatttcccggaatggaaacagccgggaactcctgcgtaaaaatgcctgcccagcccatgtgttaccggctgcgcaggcattttgtcatcccgcggatatgcggaatctgatttatttacacacaatattgataatctttcccggcacgtaaatttccttcaccacattgccggtcatcttctccttcaccgcttccctgcccgcggcaatggcatcttccttggaactgtccgcactgatgctgatgacggcgcgtgtctttccgttaatctggacagccacttcgatctcatcgtccttcatggcctcctcatcgcattccggccactgtgcatggaatacgctgtcggtaccgcctaactgctgccacagctcctctccgatatgtggggcaaagggtgccagaagtatcacgaaggtcttaagggtctccttatcaattccgccttccttcctggccagctctatcagtttattgttatactccatgaaaccggaaatcacggtgttgaggctgaactggttaaagcggtattcaatgtcatataccagcttatgacgcagctttatcatttccttggacgccttcacatccttatccttgttgtccatcaccaggttccagaaacggttcaggaagcgggatacgccctcgatgccccggtcatcccactccgcatccagctccggcggtcccacgaacagctcgtaaagccttaaggaatcgcagccgtaatccctcaccaaatcgtcgggagaaaccacatttcccttggatttgctcattttaatgccgttcttgccggtaatcataccctggttaaacagcttcttgaaaggctcgtcaaagtcaatggcgccgatatcgcacaggaacttggtgtagaaacgtgaatacagcagatgaagcaccgcgtgttccacgccgccgatatacatatccaccggaagatacttgtctgccttttccctggataccagatcttccttgttgtggctgtccacatagcgcaggaagtaccaggaggaaccagcccactggggcatggtatttgtctctctcttggcgggagcgccgcagacaggacaggtggtgttgacccattcgtcaatggcggccagaggtgactcgccggttcctgtgggctggtagctatccacctcgggaagctttaacggcagctggtcctcaggcacaggcacgcagccgcacttggggcaatggatgatggggataggctcgccccagtaacgctggcgtgagaatacccagtccctcagcttatagttgaccgtcttatggccaaagcccttttcctcaatcatgtaaggcgcttcctttttaaggacagcagactctaagccgttccaatccccggaattaatcatgatgccgtttgcctctgtatatgcctcagtcatgttctcgatttccttgccgtcctttgcgattacctgtacaataggcaggccgaacttcctggcaaactcaaagtccctgtcatcgtgggcaggcacgcacatgatggcgcccgtaccgtaatcagccagcacataatcagacagccagataggtgtctttgcgccgtttagaggattgattgcatagcttccggtaaacacgccggtcttttcctttgcctgcatacggtctacattggaacgcatggatgaatcgaaaatgtacttctccactgcttcccttgtctcatcggttgccaggctcttagccagagcatgctccggagccagtaccatgaaggtggctccgtaaagggtgtccggcctggtggtgtatacggtaatcttctcctcacgcccgtcaatggggaaatccacctccgcgccgtatgacttgccgatccagtcagtctgcatcttcttgaccttctcaggccagtcaagcttatccaggtcatttaacaggcgctctgcgtaagcagtaatcttaagcatccactggcgcagattcttcttggtaaccgtggtgccgcagcgctcgcagcatccgttgaccacttcctcgtttgccagtccggtcttacaggaaggacaccagttaatggggaattccttctcataggccagcccctttttgaacatctggacaaaaatccactgggtccatttatagaaatccgggtccgtggtgttcacttccatatcccagtcataaattgccgcaatctgtttgatctggcgcttgatattcctgatgtttgcctccgtggacttagccggatgaacgcccatcttgatagcgtagttctcagcaggaaggccgaaggcatcccaccccatgggatgaatgacatacttgccctttaaaagctgatacctgctccagacatcggaaatcacatatcctctccagtgtcctacgtgaaggccgctgcctgaggggtatgggaacatatccagacagtaatacttttccttcctgccatcattcacattgatgggcttctcttcccagttctcacgccactttttctcaatggcgctgtggttgtactgtgttgccataatctcattcctccattggttatctaaggggatgattcccctttatccagacagcataccgcctccccgtggtttttgtgaaatataaaagccctgcgcctctactgctagagacgcaaggctgaaaatccccgcgcggtaccactctggttcatgctgtctgacgcatgcgcttaatcctcttataacggtaaggtctccgtcctgtcctactggctcccggtccccgtttccggtggtccttcctcgttggggcaggctactccagggccagttcaacaaccatccgtcaccggctctcaccagccgccggctctctgcatccatccggttgtctactcttccctatctgcgtatttgcactgattcttaatttaacatatttcccaaacagtgtcaactgttacccgacaaaaaatcccctgcccctgccgctgtctctgaccaggctgccttataagctgtcttggagcgctttgtctccccggaccgtctcaccggcctggctgctctggcccatcttgccggcgtctcatggcgcgagggctttgccggtcccagggtcctggattcaatgaatttcttaacataattctaacggtcccttctcttgcctttccgtttgtccttatgttaagctaaattatatatgttaacataaataacggacaacaggaggtaatttattgaatcagaagctaaaagaaaaaatcacagaatccttatcatctgtgctgcccgttacctgcattgtattaatcctcgggatcaccatcacccccattcccctggacccgctgatgctgtttctggcgggggcagccttccttattatagggatgggattcttcaccctgggagtggatatggccatgatgcccattggagaaaaggtaggcgcgcagctggccagggcaacgaagcttccggtcatcgtcatcgcatgtatcatcataggcgccatggtaacagtggccgaaccggacctgcaggtcctggccagacagacaccggcagtacctgacatggtgctcatcctcacggtagccgcaggagtcggttttttcctggcactggcattccttcgctccctcttcggctggagcctttcccacatcctcctggtctgctacatcattctcttcatcctggccttctatattccaggtgattttcttgctgtagcctttgattccggcggtgtgacaacaggacctattacggttcccttcatcatggccctgggcgtgggactttcttccatcggtcagggaaaaaacgcggacagcgacagctttgggctggtatccctttgttccatcggacccatcctctccgtcatgatactgggacttctgttccagtcatcttccggctcctatgagcccatgaccattcccagcatcagcaattcccaggacctttggctggcattccagagtgaactcccccactatgctgcggaagtattcacagccctgttccccatcctggcatttttcctgctctttcagatatttttcctgaaaatgcgcaaacgccaggtggtgaagattctggttggaatgctgtattcctacatcgggctgacgctgttccttacaggtgtaaatgtgggcttcatgcccgccggaagctatctgggaaaacagatggcatcccttccctaccgctggattctggtgcccgtagccatgctcatcggttattacatcgtcaaggcagagcctgccgtacaggtgctgaacaagcaggtggcggacgtgaccggaggaagcatatccgaaaagaccatgatgaccggactttccatcggtatggccctgtcattgggcctttccctgttccgggtcatcacaggactgcctctcatggcctttctgctgccaggttatgccctggctctggggctttcctttgtggtacccccggtctttacctccattgcatttgactcaggaggagtcgcatccggccccatgacagccacctttcttcttccgctgtgcatgggcgcctgcgaggccctgggcggcaatatcctgactgacgcctttggcatcgtggccatggtagccatgactcctctcatcatcatccagcttatcggactgtcctatgagctgaaaacccgcagggagaaagctgtttccagacatcctgtggtggatatgaaccaggaattcattaatttagaggaggagccttatgagccataaaagcatacaactggcagccgccatcgtaaacaggggagccggaaacagggcggcttccatattccatacatacaaccatgaaatactgctggcagtcaggggacacggcacagccagctcggctgtcatggactgtctgggactggatgagcctgagaaggacctggttctgggcctttcaaacaaatcggacgcggaccgcctgctccatgcccttggccgggaaatggaattttacaagccgggacacggcatagccttcactctgtccctttcaggcatcagtctcgctgccatggacattttaagccggcatgaagaccagaccgccccaaacagccacaccgcagaacacaaggaggatatttccatgacaaattcccattcctatgaattaattgcttccgtcatccacaccgacctgtccgcgccggttatggaggccgccagaaaggccggctgtcagggcggcactctgataaaggccagggaaataggtaccgatgccggcaaaaagctgttcggcatgaccctttcccaggaaaaagccatactgctgatcctgacccctgcggacttaaggatccccatactaaaggccatatgcgaaaccgtaatgaaggaaaccggagaacatgcagtggcaatttccctgcccgtggatgcagtggagggactggccggctgatgatggcagaaaaaaccgctttctttttaggatgaatcctttataataaatattatcaaaggaaagcaggtgcatcgcaatgtacattggtgatttacatatccactcccgctactccagggccaccagcaaggagcttacgccggagcatctggacttatgggcgggaaaaaagggaattaacattgtaggtacgggagacttcacccatccggcctggagggcggagctggctgaaaagctggagcccgccgagccgggtctttacatgcttaaaaaggaatattccttacagcgcccggccatactgggccagagcagcccacgttttgttatcagcggggaaatcagctccatatacaagaaaaacggccgtgtgcgcaaggtacacagccttatccttctgcccggcctggaagcggccgaaatcctttccaggcggctggaggccatcggcaacatacattcggacggacgccccatcctgggattggactgtcacgaccttttggccataacactggaggcatgcccggatgccatctatgttccggcccacatctggactccgcatttttcactgttcggggctttttccggttttgataccattgaagagtgctatgaggagctgactccccagattcatgccctggagacaggactgtcttctgatccggccatgaaccggagactgtcagcccttgattcctttcagctcatctccaactctgacgcccactctccagccaaactgggcagggaggccagcctttttgacatccccatgtcctatgcagggctctacggcgccattcagaggggcgagggccttagggggaccattgaattctttcctgaagagggcaaatatcattttgacggccaccggaaatgccatctctgcctcagtccctcccaggccagaaaatacaacggcatatgtcctgtctgcggcagaaaactgaccacaggcgtacttcaccggattgaacagctggccgaccgggacgaagatttcctgctgccccagggacgtccatttgaaaatctggtgcccctgggcgaggtcattgcctcctccgtggggtcctccccctccagcgtaaaggtttccaggcagtatgagcacctgctggaggaactgggcaatgaattttatattctgcgccaggccccgctggaggacatcagccatgtggccggagccctgacagccgaaggcatacgccatctcagggacggcaaggtccagtggaggcccggctacgacggcgagtacgggaccatgtgtctgttccagtcagcagagcttaacaatgtggaggggcagctgtgcatgacgtttgatacagaggaagaggacctatcggcctatacagcgttatccggcaaagctgccggttccggcagcacatctggcccatcggccccccacggcacacccgcctcccgcgaaacagccgtctcaaatatcccgactgtttccatgccttcctctgccctgaaccaggaccagcagcaggccgtggagtccgtgtttccggtaacagccgtcatagccggtccgggtacaggaaaaacaaagacactggtttcgcgtattgaataccttattgggaatcggggcgtaaaaccttctgagattacagccgtcacctttacaaacaaggccgcgaaagagctgacccagagaatccgccaggcgctgcccggcaagcgcagcctgaaccagatgcaggtcgggaccttccactccctctgctaccggctgttagcccagtccggaatagagctgtccctggcagaccagggccaggcggaagaatgcgccggggaaaccatagcagccctggaacttgcctgcacggtcaggcagtttctcactgccgtctctctgcacaaggcagggctgtccgcccttaaaggcatcgaagcccaaatggccgatggctccgccggggaaaccggctttaccctgacaccggaatcggcagcccggtaccagcaggcgctggacagcaggaagcttatggacttcgacgaccttcttctcaacatgctgcgccttctccggcaggagcagagagcagaatacagaaagcagcatttttcctatctgctggtagatgaattccaggacatcaacccggtccagtaccagctcatcaaggcatggaataaaggcggacgggaactctttgtcatcggtgacccggatcagtccatctacggcttccggggctctgacagccggtgcttcgaccggttggaacaggattttccgggaaccagcgtcatacggcttaccgccggctaccgctccaccccggagatactctccgcctccctttttctcatctcccgcaatccgggcggtgagcgcaggcttgcggccgtccgtccacatggcgatccggtgcgtctggtgacggcggaaaccagtctgtctgagtccatctttattgccaaggaaatcaaccgcataatcggcggcatcgacatgctggatgcccacagccaggctcccggcctgcgggatactgccaggagcttttccgacattgccgtcctctaccgcaccaatcatcaggcccgcctgctggagcaatgcctgcaaaaggagggaatcccttacgtggtagcaggaagggaggattatctggatcatccggctgtccagggtaccatctcctttttcggagccctgcttagacagtccgggatagatggggacacgctggagctctgcagaaagcgcatttccccttccgctgattacagaggcctggaggaacggttcctgccaagactaaaaaaagacaagccctggaagcttttggagaactggatttcatgcctgggactgggtgcagacaagtccatggacacctttgtctgcatgtcctattttcacaagaccatggaggatatgctgaacacactggcctttggacaggcccacgacctgaagcgaagcggccaggactcccgcccctccgatgcagtgacgctcatgacctttcatgcctcaaagggcctggaattcccggttgtctttctctatggcttaaagcagggaatccttccccttaaaacaggaaagggacctatggatccgtatgaggaacgccgtcttatgtatgtgggcatgacaagggccagagacgaattaattctcaccacctcagaggaaccctccccgttcttagaggagcttcccaaagatgcctgccgcgatgaaaaggcccaggcacccggcagcgggatgaagcagctgagcctctttgacttcatgtaagcttttgagtaccgggacgccggcttttcccttcaatgccaaaagacctgacgcatgccacacagatggctgcatcaggtcttttcacatattcacatatatcaggaaaccggaatggcaataccgggcatcctatctctctggcataggcacataatccatattgtcgcctacatacttggttgccggacgcataatgcggccgtcatacaacttattctcaatattatgggccacccagcccacaacgcggctgcacacaaacagaggtgtatataaatcccttggaatccgcagcataccatatgcaaacccgctgtagaaatccacattggttggaagggccttacccttgatttcctccattacctccttggcaatgcgctcgaaacggatgtagaagtccagctccctggtatgcttctgctccttggccacctccatacagcaggccttcaagacctccgcacggggatcggacaccgtgtaaacagcatggccgaagccgtatacaaggccggaacggtcatagagctctcctgccatcagcttctctacggactggcggattttcttatcgtccgcatcatagccgcctgtttcagccagcacggcgtccatcatctccgccaccttgatattggcgccgccgtggcgcggtcctttaagagaaccgatgccgccgcataccgtggaatagatgtcagtgccggtggaggcaatcaccacattggtaaaggtggagttgttgccgccgccgtggtccgcatgaagcatgagtatggtatccagcagatttgcttccttggacgtgaatttctggtcctttctcaaaaggcttaagaaattctcggcaatggaatattccggatttgcataatgaatgaacaggctttccctgtcataataatgcaccttgctctgatacgcgtagcaggcaatggagggaagctttgccaaaagattgacgcccttgaccagtgtctggtatacgtccgtattatccgggtcatcatcgtaattatacagggtaaggaccgcgtcctgaagcttattcatcagattcttaccaggaaagcgcagcaggttcatttccacgaaatcatccggaatggtgtagcagtgcctcaccacattgcagaacttctccagttcggctttcttcggcagatatccaaacagcaataggaaacaggtttcctcatatccgaaatggctctccttctttccctttaccaggtccagtacatccacaccgcggtagagcagccgtccgggaatagccttgattcctccgtctgcctcctcatatcccacaacgtcggccaccctggtaaggcctatccgcactccggttccgtcctcattcctgaggcccttctttacattgtactctttataccatttgttaggaatatccgtataattctgcgacttcccatagaactgtgcaagaaaactttccttaaccatgcgcccatactcctttcccaaatatccccatcagtgtctgcccctgttatagttaatcagacagccggcctttacaatatcccgctcctctgccgtcatatccgcaatatataaatccagggttcttatgctgctcccctcttttcccagcacataagccttaatatcctttaaattcccgtccagggctttccttacgcccggaacataaatataatctcctacctcaaagcagggagcctcctccatctggaaaggaaccatgccccagttcatcacattggaacggtaacgcttggtggcgtactctttacagatattggccaggccgccgatcactctctggcagctggctgcctgctccctggcagatccgtcgccgggttttacagcataaatcatgctgcccacttccgtgtcctgaaccgttacattctcattgccttcaatgccgcgtatggcgtcaaagagcttctccaaagcaggctccagctccagttcttttgccgcgccatccctaatcctggccttttccagcttatccacttccttggctcttcccacgtactcaggatctcttctggataaggtgaattctgccaggcccagcggattggaccgataggatgaggtttcgccggagggaatcagctcatcggtggtggtcacagggtccatgattttagaacataccttcaggagaatgttgtcagccagagggctcatctccggccagtccttgatattcggtccatagaccagctcccttttcccgtcgcctttgttgtatcccatgtatacccggtttttataggaaatgccgtcaaattcatactcaggcacattgtcccagccctccatctcccacgcggaggtaagctttcctccgttggctgccgtagctgcaatggaacgcgcatccatcagggcaaccgctgccatctggccgctgcccggtttggaaccttccctgttggggaaatttctggtggtatggcggatgctcagaccgttgttgcagggagtatcgcccgcgccgaaacaggggccgcagaacgcagtccgtatgatggcgcctgcgtccatcaggtcggacacagcccccttctttaccaggtccgcaaagacaggctgtgaagacggataaaccgccagggagaactcgtcgcagccgcagttctttccctttaatacacgggcagcttccatcacgttggaataggtgccgcccgcacagcctgcaatgactgcctgctgtaccataagctgtcctccctgaatcttatccctcaaggtgaaggatgccttgccgcccgataccttggctgcttctgcctccaccatgcccagtatgtcgttcaggctggccttcagctcgtcaatctcatatgtattgctggggtggaagggaagggcaatcatgggctttaccgtggacaggtccacgtatacgcagccgtcatagtacgccatatccgcaggagccagttccttataatcctcctccctgtgatgcctggccagatatgccttcgtatcatcgtccgtcttccatatagatgaaaggcaggtggtctccgtggtcatgacatccacgccattgcggtaatctgtcgtcatggaagccacgcccggtcccacgaactccattactttattctttacatatccgcttttaaacacggctccgatgatagccagggctatatcctgggggccggttcccggctgcggcgcgccgtccagataaacggctatgacgcccggatacgccacatcatatgtatccttaagcagctgctttaccagctcaccgccgccttcacctatggccatggttcccaatgccccgtaacgtgtgtggctgtcggaaccaagtatcattctgccgcatccggccatcatctccctcatgtactgatgaatgaccgcaatatgtggaggaacatagatgcccccgtatttcttcgccgcggacagaccgaacatgtggtcatcctcattgatggtcccgcctaccgcgcaaagggtattgtggcaatttgtcaatacataaggaatcgggaacttttccatgccggaagccttggctgtctgtacaatacccacgaaggtgatgtcatgggatgccatgctgtcaaaccgcagcttgagatgttccatgtcaccggatgtgttgtgggcctccagaatggagtaggcaatggtccctttcctggcagatgcctggtccgcgtccttgccggtcagtttctttacctttccgctctctgattccggtacgatttcagtgccgttaaccagataaataccgctgtcatacaatgataccatttcattacctcctggtgtctgattttatgaaaaagggctcggcttggatttccgcctgcccccttacattcgttggttattactataaaacaaaatattcgatttgtccagtatttttattgtggtcaccacaacttttgcattgtaaatcatattgactctgacatgtccattgctgtcacatgctaatactttatcatacgaaagcgccggtgtaaatcaccaatttaatataaacaagccgcagcatatgacaaaatagacaatcatccccacattcagaaatgccgtcttgaatgctcttccctttctcagaggccattgtcccggccggaaggtaatctggcgccggtacatgatgataaggataatggccgcaatgaggcaggccagcatgaaaaagaaatatgccagtatcatgacagaggaaaacgcggtcaccagccatcccatgtcaattcccagaatagattcaatctgccgtataatccacggcccctctgccagcccctgggcgccctttgacagttccacggtgatgacgccgcccaacaggttaaacagcatatggaacccaatggtgtatcccaccttccctgtctttgcgtacacgtaggcccaaagaattccaatgccaaaggcataaaaaaactgggaaaaattgccgtgggccatgccgaacataatgcccgacatgatgatggctgctttctgtccatatcccagcagccggtccatgaccagctttctgaaaaaaagctcctccaccacaggagccatgatgaccgtcgtcagcagattgacccacaggctggaatttctgataagctggtccaataaaacggagtcaggtcccgatggctgtaaaatccctgccagcctgcccagaatatttcctgccagcccgattcccactgcaatgacaaaaaaggacgcaaatttccagaatccccactgctccttctggggcgaaccgcacttcggcacaagctggagcagtcctgccgccgccggaaaggccaccaggtacatgggcagggacgacataagcatacgccccgtaaatccgtaaaaatcaatgaaatcgcccagcagggaattaagcagccccaccaggaccatgaccgtcatctgggcagccagggtaatcagcataaaggccgctgccgccagccccacatgtgagaactgcttcctctggcgccgctccatggcagctgcctgctccgggtccggctcccaggccgttcccctgttttcatattcatatatcataggccatatccagtctccttcatcagatcttatacagtgcggctcctgttctatgtgtcacaccgcactgtatggtaactgccaaaagacagttctttttagtgttgcaattgcaacaaaaaagtattatgataataaatatcataccataaaagatagcagggtaaaagaaacatgacagaatattttcagaaaaacctatttaaagacatttccattgacgagtataaaaaactgctctcctgcctggacggaaggacaaaacagtttaaggcaggcgagaccatatgcgattacgatgagggctttcatgaaatcggcattataggcaaaggcactgcctccgttgtccgctatgaatacaacggagccagaaccatcctggagcgcctgggcccccaggacatcttcggccatctgctgtcctacaagggcagcgaacatgccggtatcagcgttgtctgcgacagcccctgtgacattctcttcatccactatgccaccatcggctctccctgcaccaagtcctgcgcccaccaccaccagctgacccagaatctgctggacctgatttcggagcgggccttaaacttaagccgcagggtggaggtcctgtctcagcgcaccatccgcgagaagctcatatgctacttcatgcagctggccgcccaggccaaagcctcctccttcagtctcccctttaccatggtggacctggccgattacctttccattgaccgcagcgccatgacaagggaactgaaacgcatgaaggaggagggactgattgagatggacaagcgctgtgtccgcttattcctttagcctgtcctcaaactgccgggcgctcatagggcgcccaaaataatatccttgtatatattccattcccagttcccttacagcctcatattcctcttttgtctccactccctccaggcataccttcctgcccacatcatggcacaggtcggtgatggatcggataaaggtggcattaaagggctctgaggtaatccccttcacaaatcttctgtctatcttcaccacatccacggggatgcttttcaatgaaaacagagacgaatatcccactccgaaatcatccatggcaatttttaccccaagctccttcatctgtgcgatcaggcggagggtgtcctcctctgcctttgccagatatgtctcggtcagttccatgatgagcctggatggatccaggctgttttcctccagagccgtcctgaggaaggagataaagtccccctgggaaagctggatataggacagattcacactaatctggaaatccggccttgaccggcgccactccaggcattgggccatgccatggctcagtatccactgtccaaaaggtacgattaaaccgctctgctccatcaaaggtatgaactctccgggagagacatccccatacttgccgcagtgccatctggccagggcctccgctccgcagagcctgcccgacaaagtgtctgcctggggctggtaatggatggagaaccccgcaaatccgcgctccacgctctcacgcaaaagctccatcagctccagccgccgctccctgtcggccagaatattcctggaaaacacggtcatccggttctttcccatgattttggagtattccagggagtagttggccctcttaaagagctccagataattgcccccgtcctccggataagcagcatatcccgccgacagggtacagaagtatttctttcctccgtattcctgctgtttgcagaagttctgctgcagcttgtcaaatagatgggccgcctcttttgcgtctccgcccaggaggaggatgccgaattcatccccatccagccggtagagcatggcattgggcggaagcatggatgccaccttctgggccgtaatccgcaggacctcgtccccgaaagaccggtcatacagagcattgatatttttaaaggaatccatgtccagcaccataaggccgatggtgtccatgcatttgcggtctgccaggtatttctttatattttcctcaaattcatatttgttgtaaaggccggtcatatggtcaatctggttctttttgcccagattgctgatcatgccggcaaacagcttaggctgcccgtccttatccctgagcatctttcccctgcaccgcagccatgtccactcccctctcacgttcctggcccggtactctatgttgtgatactcttctcttccgtctgctatactctgattgctctccagaaaataggcctcatcatggggatgaatcagctgcccccaaaatgcggctgcctccctgaccacctggcccggcaggccgaattcctccaccatggcctggggataacaaaataccccggtcttcatatttcccacaaagatatagtcgtccgtgctggcagacagcgcttcatagaggcttccgccgtcataataaaagggggcatccccgtcctcatgtttctccccaagcctgcgcttggcacgctctatgtgatatcctctcttctgtatatacatctgctcgtctgcccgggatatgatgtcctccaccgagcccatatccccaggacagacctctgcgattccatagctgaaggagacgtcatattcctggagctggcgtttccgttcctgtcctgccctggtcaagagacgcttcatgctttcgtctgccgctttcatgtcccgcccataaaataccatgacgaactcatcaccgctgagacggtacatgaagtccagccttccaaggcactccttggctatggctgccacgtactgaagaagcctgtccccctcgctgtgtccataccggtcattgaccgatttcagctcgttgatatcatacagtaccacggtcaccacctggttctcacggctcccctgctccagggcccgcataaggcgttcactgcctccccggcggtttagcatgcgtgtcagctcatcggtgcgggccgtctccgaaatcttgtcatattccgtcatgtccacggaattctgaatgtggtatatcttccccctccactgaatcaggctgtcataattcctgtattttttgccggtcacagaattggtctcgcgccagacacagattttattgccctccatctgttccatctgcctgattttacagtaagggcaccgttccttcatatccttttgcagcacctgccaacagacacagccttccggccttgtaagcccgaaggtttccttcatggttttattcatataaaggatttcatccgtttctacatccgttatatagaaattggtgtccatttggtccaaaacagctgccaggaatgtatccttaaatgagttttgctgttcttccatctcaaaaaatcctctttactatatttgaaagctctctctttattgtaaactctttccagattatgtacaaggggaaaatcaaataaaaaggcgcctattcccgggttttatccgggaagaggcgccagcgcacatcttattcttcaacaacagagaacatatcttttccgactccgcagataggacatacccaatcatccggaatatcctcaaatgcggttcccggctcgattccgccgtccggatcgcctgcctcagggtcatatatccatccacatggatcacatacatattttttcattatcatttcctccttaattatcatatcatttatctttgttttgaatcatttcctttgatgtcattactatatcataagtattcctgtttttctgtgatatttgcaacattaaaatgactttttgatataatatttaatttgccacatattccggaaaacatgcatggaaaaacagctgcccaaacttactccgggcagctgtggcatttacttttattcgccgtccttggctgcagcccttgcttctatctcacgtttctgtacatcgccgggagcctgctcatagcggctgaattcataggaataatcgcccaggccgcctgtcatggagcgtaggtccgtattatatccaaagagctcagacataggaatatccgcctcaatgacctgctttccgttgtgattggaattcatgcccagcacgcgtcctcttctgcggtttaaatcgcccatgacgtcgcctgtaaacttatccggaacagtaaccttaagggaggcaatgggttcaaggagtactggatttgcttccatgaagccctgcttaaatgcaagaatggtggccatcttaaatgccatctccgaggaatccaccgggtgataggagccatccagaagagtggcctttaagcccacaaccggataacccgccagcggtccctttaatacgcattcctgcagtcccttctcaacagccgggaagtagttcctgggtacggaaccgccgaatatcttttcctcaaatacgtacggtgtctccaaatcgccggatggctcaaactccataatgacatcgccatactgtccgtgtccgccggattgtttcttatgcttgccctgaacctttactttcttgcgcagggtctcgcggaatgcaaacttaggcgggcttaaggtcacgtcaaccttatagcggctctgcagcttgctgattaccacatccaactgctgatcgcctatgccgtataacagggcctgacggttctcagcgtcgttgacaaccttaagggttaagtcttcctccatcatcttagccagagccgtggataccttgtcatcctcacccttgttcgcagccttatatgccatgtatgtgtatggtgtggaggtctgcggcttatggtatacaatgggtgccgtgcgcacagccatggtatcgccggtctgggtcacggtcagctttgcaacggctccgatgtcgcctgccctcagctcctgcacctcaatctggtccttgccccgcaggatatagagcttgccaatcttttcctccgtatccttatttacattatacacaatcgtatcgcctttaagggtacctgtacaaatcttcatcagtgaatacttgccgatgaatgggtccacgatggtcttgaacactctggcggacagggacacatcgtcgttgtatttggcggtaaagcgctcgcctgtggaaacatccacgccgatacactcaaaatgatcaggtgacgggaagtatttgtcaatggcctgcagcagaaccttaaagccctggcagttaatgccggaacccatcatgacaggaacgatgtccccttcaataacatgggtcctcagagcggtggaaatctcttcctgggtaaactcttctccaaggaaataacgctccatatattcttcactggtctcggcaacggcttcaatgagggcatccctggcaatggtcaggtttttctggacataatccggaatctcacactcttcataatcacttaaattagtgaaacggcgtccgcccatctttaccacattgacgaaacctacgaacttttcattctcacggattggcagctggaacggagcaatcttacgtccgaactttgtctccagcttaaccacaagctcacgatagctggcatggtcatcgtccatattagtgacgaaaatcagcctgggcaggttgtacttctcgcacatctcccatgccctctctgtaccaggctcaatacctgccttacagttgacaacgataatggccgcatcggcaacactgattgcctcctcaacctctcctacaaaatcaaaaaatcccggcgtatccagaaggttaatcttaattggcccgtcctctccctcatattccagcggaatcagggtggtggagatagaaaactgtctcttgatttcttccttgtcataatcgctgatggtgtttccgtccggcaccttgcccatacgttttgtaacaccagtcagcagcgccaatgcttccgcaactgttgtcttaccagcgcctccatgtccaagtaatacaacgttgcggatttgttcagttccatatacgttcataaacttccctcctgttcattaaatttaagcctatgcgtatattttactaaatttttcagaatttttcaagcattttatatgatttgcacaacattcttttgaggttgcatgtccagccgcgggcaacaacgtaaaatcaaggcaaaatggtcgcatagcgtttcatcttatccatacctttgcctgttgtcattctctttaaatatgctgttatctttccaggcttctggattaatttctacctttaaatcgcgcttcaagaaatctccattgctcctgtctttcttcatgttcatataggaattgctcaataggacaaattatattatcatccttggatgattttattagaggaattatttcttcgtaggcagatttaactccttcttcctttaataacctcaatccaccttcagacacttttaccgcatggcattctctgattggtatctgtcctgccataattcccatcgcaatacctgcttgactggcatatagaatcatatcctttgactcagaaaatttgttcttaaagtatgcgcgatacatccctgagaccggacttttgtctgtctcccaaatgatattgtccgagtcatcagtcagaatagctaatgctgttttggccagcactttctggaataaatcatctctcattatgacacctgctctcaattttacagcctgtcagccgcttccttgattctctttaacccctccatgactactgctctgggcgctgcaaagttgaatcgcataaatccagttccttccttttctccaaaggtagtcccatcgtttaataatactctggcatctttaaacataaagtcctttagttctttctgtgtcttgaaaccaagtccgcgacaatccatccaaatcataaaggttgcctctggattaattgcttgaattttagggatattctcatttatgtatgtaactgcctggttctttgtctcatttaggtaagcgacgcactggtctgcatagtcatcaccgtgattgtaacatgccatcaatgctacatttccaaatatatttcgtcccataccttttttataagtctgttggttcatcattctgcggtaaatctctttgttatgtgtaaaccacgcagctgtgcggaaaccagccacgttaaatgttttagcaggattgataaaagttacagaatgattggcgaactcctcagagataccgcaaaacggaacgaatttatgcccgtcaaaaataatgtcagcatggatctcatcaactccaatcattacattgtttcgtatacataattctcccatccttaccagttcttccttagtaaagcatctaccagttgggttctggggattacagataaaaagaattttcactttagggtctgctaattttctttccaaatccccaaagttgatttcataccgtccctctaccaggtccatctcattataaatcagttgacgtccgttatttttcaccaaatcgtggaaaggcggataaaccggcgtctgtaaaagtattttatcaccaatacttgagaattcttctgtaaaccatatcatagccggtattacacaaggggaaaaatcaatatattctggattcagtactgtattatgtcttactttgtaccacctggcaatacttttttcaaaatcagaatcaatatatggatagccgtaatgattcatctttacacgctccatcagtgcctctgtcacctctaccgggcttgggaaatctgtatctgctatccagaatggaagtacatcttctgggcaaagtgaaggatcgtatttctttgcatcagttcctcttctctctacgcctttatcaaaatcatatattgttttactcatagtggactctccttttcttctttgaataataacatattttcatgtattttagacaactgagtatgatacaaccagattacatatatacattacaactgcgggaatagaacatctttttacaatatccataatatccagttcagccatacctgatatggcaattacaacacctgcaacgggtgacatacagcgtccgataccagatgataactgcatcggaagagcgattgtagcagtggatactcccatctgagctgtcacatccggtactagcggaccaaaagcataccatgaagcattacctgaaccaagaagcatgcctgcaaagaatgttatcattgacattaatgccatggtaataatgggagcactcttaacagccgctaaagtgttgcttatgattgtaatgccacctaacattttgatggcttcagcaaatacagccgcaccaatcaggatactcacaacatttgcaaatgaatttcccattgctttcatcacaacactaaaatcactcgttacttcttttctatctcttcgtcttactaattccagaataaatacgaaaaacagtccaagcaagtttgctgtaaccacatcaagattaatggatggtataaaactgaatactgtaatcaaaaccaggggtacaatgggaagtattgcatagtacgcaggacagctgacgtcatgaggcatatccgcctttgaaacggaaatcccatctgatacatccttcttatccatatgtctcagatatataggtagaaagaccgcacagattataataagtatagatgcggttttcccttgataagtaaggaaataatccatcataggcataccaactacattctctgccgcaaatattgcgcttgaatcatttggtccccagtcaacaaagccacacattatcattacagtagcggcacttagtttacttattcccaaggatgtaagtatagggaaggcaatggccatcaaaagcatagccaggccagcatgacttgtaatgaccattttcagtaatgtaccaataacaaaaagcatgcttaaaacaatatatggatttttgatttttgataatggtttagttgcaagatatgctagttttgtggatgcccctatgtgtgacatgtaaacagcatatccagttaccatcatcaaagtcagtccaacaccggatgcattagatttaaatgcgttggctgcataagcgaacacatctatgacagcattaccagtcgttttatcatccattattgaattgccgccaatgattgcgaatattagcaggattaccatgcctgataccaggaatacaaatactgaattatactttttaatcaccaatgttgcaactatgactatgtacagcagcgttatcatcacagctatagcattattcattttatctctcctgtcttttagtttcccaaaccaccgcggtaccgggttgtttaaatcagatatacaaaaccaaactattttgtttatattcttaacctatagtttagtatgtataccttatgtttagattctaaactaattataatttgttgtcaataccatttatacactttgtctatatgcacgaatattgcatttattttttgtacaatatatccaaaactattcagtatcatctaattagactatttctgatacagcaaaggagccacaacatttgttgtgactcctcaatcgtcttaacgaatatatattatatggatattttactatttacttatctcttttttgccttttttcttgcgtttctgttatcttgaaccttgcgtcttatatccaaccatgcttcaagtacgctgaaagtggtatttatctcatcctcagaaaaatgttccctaacaatatccatagactctccaaatcctatctcatcatatttgcggtgggcttcattcagttcctttcccttttcagttaagaacaggtgaaatcgattgtcattttcagagtccacttccctgtatattaagcctttactttccacttttttcaggatttgagaaactgcccccttggtctttccataatctcttgccagttcagttactgtaattccatgatgatcagcaatatgctttaacgtgtgtacctctactgaagtataggcttcgcctgttccataatcatgaggcacttttgtagagatataaaaattcgaaacctgatgtagtatatctactgcttctacgtcattatatgatttcttcatcttcttatccataatatactcctagttttgatatacaccgtattcgtcattaacaatttgttaaagtatactatatttagatatcaaagacaagtttttattccatttgtttcggattttacgccgctatggcctcctcagcaaccataacaagagtaagcttatagagatgctgtcaaggaggattgtgagatttggactttaacttttcatctttacttctattattacaaggtctgcccggccaggatgctggtggggacgataatccgcttgtattcaactggcttgcgctccatctgccggaggagcagatcacaggcgttgcgggcaatctctccgatattctgctggatggaggtaatattcaaaatcgtccggcttgccacggatactccgtcataaccgataattcggacctcctcaggcacccggatgcccagttcggccaaggccagatatgcccccaaggctctccagtcgctgatagcgaagaccccgtcaaactcatagtcagtgctgatcaggtagcggatggcttgcttgctttcgtctaaaacctcccggaccctgggcgtgcggatgattcggtcctctcccaactcgatcccgtgcctgcggtactccccccggaagctctcaaaccgctcccgcatccggtgggagatcaggttgctccccagcaggatgggcttacggcttcctttccgatagagctcctgggcggccaggacgccggacacgcgctggtcgctctggacctggcagataccggcggtctgctcggggggatcggtgcagtcgatccacacatggggcagacgggggtccaggatattccggacggcgagataaccgcaggtgacgaggatcacgccgcagacattgcagtcgtagatggtccgcaggatatccggcagggcctccttccggtagcccaggctggcgctgatggtctggatgccaagctccgccagggtgtcgtggagctgaatcagcagagcccggtaatagtcgttgatttgggtgtcgaccacgacgcccactttttttatcccggcggcggagggagacggcggacggtatccgctctcctccagcgccgacagcaccatctgccgggtggtctccgccactttggggtcgctgttcagcacccgtgacaccgtggccgtggaaacaccgcaccactgggcgatcatctggatggacacgtcttttctctgggccataaactcgcctccttgtcttctctatcataccacagcagggccggaatgtaaatttacaatgcgtagcaaaaatatacaatttgcctctgtcaaaattgtatacctctccaaagttctgagaatcctaaaaaaacgcttgcaatttccgtgatgttaatttacaatctatattgtaaaatttcatttataaaaagtaaatttacattctggagaggagatattcacatggcaaaaaactacgcaaatattgcgaaggaagtcctccggctggtgggcggggacaaaaatgtatcccactttgaacactgctccacccgcctgcggttttccatcgtggaccccggcaaagtggatcaggctggactgaaaaaggtccccggggtcatgggggtcgtgggcagcggcaatcagtgtcaggtggtcatcggcaacgatgtcatcgaggtctacgacgaggtccttaagctgggcacctttaccggcgggactccggcccctgtcgcccagggaaagcgggatatcggcgccactgttctggacctcatggtgggtatcttccagccgttggttcccgccatcgcgggcggcggtatcctgaaggcgttcctgtccctgtttgccctggtcgggatcatggacagcaaaggcgtcctgtatcaggttctgatcaacgtggcggacgcgcccctgtacttcctgcctgtgctggtggccgtcaccatgtccagcaagattaactgcaaccggctgatcgcggtggccaccgtgggcgctctggtgcttcccaaaaccgcggctctgctggcttccgatcctgcgcccaccctgtttggcctcaccctccagaacgtgaactacgcctatcaagtgttcccggccattctggcggtgaccgcgctgtactttgtggaaaagtacgtcaccaagatcacgcccaagcccattcgggtgttctttgtccccatggtgtgcttcatcatcgtgttccccctgaccctgctggtcctgggccccatcggcctaaccatcggcaaggggctgaccacggtcatgctcaccctgtataagtatgtcggctggctggctgtgggcctggtggccgccgtcctgcccctgctgatctccatcggcgcacacaaggcgtttatcccctatgtggtcgcctccctgggcgacccgagcctgggctacgaaattctttacaacggcgcttcgctggcgcataatatctccgagagcggcgcttccctggccgtcgccctcaagacaaaagacccggagctgcgctccaccgccttttcctgcggcgtgtccgcccttttcggcgtcaccgagccggcaatttactccatcaccatacagcgcaaaaaggtcctctacggcgtgatggtgggcagcttcatcagcggttccttcatcggcctgatggcggtcaaggcgtttgtggccatgggccccggtctggccggtatggccatgttcgtggaccctgaaaatacgatgaacatcgtctgggccttcgccggttttgggatcgcgctggtatcctcctttatcgcgacgcttttcctgtacaaggacgaggcaaaggcggaggctgccccagccgggcagctctccggcgagctctccgcacagtcctccgagccggaggacgacacggtgaagcccggctctctggtaagccctctccagggcaccgtggtgcggctggaggacgtgaaagatgaggtgttctccaccggcgtcctgggtcagggcgcggccgtgcggcccgcgaagggcgaactctatgccccggtgaacggcaccgtcaccatgatccccgacagcaagcactcgatctcgcttgtggacgcctgcggcgccgagattctgatgcacatcggcatggataccgtgcagctgggcggcaagcactttgagccccaggtcaaggtgggcgacagggtccgcaaaggccagctcctgatcaaatttgacatggacgccatccgcgccgccggttatgatctgaccacacccgtggtggttaccaactcggatgagctggaggtcacgaccctggcccagggcgatatcgaggccggaaccgaacttttgaaatgggagtgatataaaatgagttttccgaagggttttctctggggcggcgccgttgccgccaatcagatcgagggcgcgtggaatgaggacggcaagggctggagcgtggaggatgtggtcaccttcaagcccaaagtggacgtaaaggactacaaggccaacgtccacacctccctggagggcgtcaaggcagctatggcggaccccgaccccacctattacgccaagcgccggggcatcgacttttaccaccactacaaggaggacctggccctctttgccgagatgggcttcaaggtgttccgcctgtccatcgcctggtcccgcctcttccccaccggggaggagacggagcctaacgagaaggggatcgccttctacgaggacgtcctccgggagatgaaccgcctgggcatcgagccgctggtgaccctgtcccactatgagatgcccctggagctggcgctgaagtacaacggctgggcggaccggcgggtgatcgggctgtttgtgcggttctgcgaggtctgcttccggcggttcggcaaatacgtcaaatactggctgaacttcaacgagatcgacagcctgatccgccacagcttcaccaccgccgggatcatcccggagctgtgcggggagcggggagagctggcctgctgctaccaggccgcgcacaaccagttcgtggccggagccatggtaaccaagctgctgcgggagctggtccccggcgcgcagatgggcctgatgctcaccaagctcaccacctacccccacacctgcgccccagaggatgtggccgccacccagaagaaaaatctggagaatttcttctacgccgatgtacaggtgttcggagagtacccccggttgatcctccgtgacctggaaaagcgggggctcacgccggagatggagccgggcgacctggagctgatccgggcgcacacggtggactttgtctccttcagctactacaactcctccaccgagtcggtggaccccaacgtggagcgcgtaccgggcaataccatcctgggcgtgaaaaacccctaccttccctcctctgagtggggctggcagatcgacccggtgggcctgcggatctccctgattgagctgtatgaccgctaccgcaagcccctcttcgtggtggagaacggtctggggatgcgggacacggtggagccggacggctccatccacgacccctaccgggtggactatttccgcgcccacttccgggagatggaaaaggccatcgacgccggtgtggagctgatgggctacaccagttgggcgcccatcgacctggtcagcgccaacaccaaccagatgagcaagcggtacggcttcatctacgtggaccaggacgacctgggccaaggcacgctggagcgcaggcgcaaagacagcttctattggtatcagaaggtcattgccaccaacggcgagaacatggattgatttccattcattttatcaaccagaaaggaagtattcttatgaaacagttcacctacaccatcactgaccccgtaggcatccacgcccgccccgccggggtgcttgccaagcaggccaaagccttggacagcaccgtcaccatcgccaaggccgatggcaagtccgccgccgcgaccaagctcatggctttgatgggcctgggcatcaagcagggcgataccgttaccgtaaccgttgagggcggcaatgaggaaaccaacgccgctgctatggagaagttcttcaaggataacctgtaagcgccgcacaaaaggggcgtctgccttgcggcagacgcccctaatcatgtttctctgttatttgcacggagaataccaaaaaatattgtaggaggaaatcaccatgattttgattcagggaaaaggcgtttccaaaggtgtcgtccagggacctatctacttcttccagcgcgcgtcggcggcggtgtccaacgctgtggccggcgatttggaggaggagaagcggcgtctggaggaagcgaaagaaaagtccatggagcagcttaacgccctcgcggacaaggcccgggaggaggccggtgaggatgccgccatgcttttcgagacccacgccatgtttgtggaagacgaggacttctgcgactgcatgaacgccgcgctggaggagcaaaactgctccgccgagcgggcggtggagatcgccggggagcagtttgccgcgatgctcgccgccatggacgacgcctatatgcaggcccgggccgccgacatcaaggacgtgtcccggcgtattttgaacaacctgatgggtgtgactgagggtggtatcgactccgacgagccggtaattttggccgcagacgatctggccccctccgagacgctgcaattggacaagagcaaaattctcggcttcattacccagggcggctccggcaacagccacaccgcgatcctggcccgcaccatgggcatccccgccatctgcggcctgggtgactccttgaaacaggatatggccgggcgtgtggcgtacatcgacggtgagacgggcaaagtcgccatcgaccccgacgagatcaccctctctgcgttccaggctaagatggaaaagcagcgggaaatgaaagagctgatggaaaccatgaagggccaggaggatgtgacactggacgggcgtcacatgatggtctactgcaacatcggctccccggaggacgtagcggcggtcaagtccaacgacggtcagggcatcggcctgttccgctccgagttcctgtatctcgccacctccgactaccccaccgaggaggagcagttcaaggcgtacaaggacgtggccgccgccatggacggcaagcgggtggtcatccgcacgttggacatcggcgcggataagcaggtggactacttcgagatgcagaaggaagaaaaccccgccctgggcgtgcgggccatccgcatttgcctcaaccgtcctgaggtgttccgcacccagctgcgcgccctttaccgcgcctccgcctacggcaaggtcgctatcatgttccccatgatcacctccgtgtgggaggtccgggagtgcaagcgggcctgccagaaggtcatggccgagctggacgccgagggcatcccctaccgcaaggacaccgagatcggcatcatgatcgagaccccggcctccgtgttcgtggccgaggagctagcccgcgaggtggacttcttctccgtgggcaccaacgacctgacccagtacaccctggcctgtgaccgtcaggccaacgacctgggcaagttcttcgacccccaccaccccgccgtgctgcgggcgctgaagatggccaccgacgccgcccacaaggcgggcatctggatcggtatctgcggtgagctgggtgccgatctctccctgctggagaccttcctggccatcggtatcgacgagctgtccgtgtcaccctcctctgtgctgcccctgcgggctgagatacgcaagtccattgccaagacctgtaccttggagaagctggaatgctaaacagaaaagataccacgaaatcagcggaagaggcggggtaaaaggtaacgggcaagcaatggggctgtgaagaaatagagtagatggactctatttcccacagccctcccactttttgatccagaagtctgttactttcctaaaaaagcatatacctcccccttacccccacagaaagcgggcccttcttttttatgccgcaacagcagcccttttctttttattcctgaatttatagagattatggcctattgataccaaatatatttccagactcactcggtttagctttcttcttaccacacgtttgtaccatcggtcatactttatgattccaaacgtcccttccgcttgtatcgaacggttcatccgcagcagcgctccctggatactttccaggttttcgactacttcctggtgcatacagctcagctcccggttcatacacaccatacggttcttatctgtctttttacattgttccttataaggacatcctccacagtcctcacatgtatagtactcttcctggcgtccatatcggttcccttttactgctttcctgtatgcaaaatggaacttctttccccatgggcacatcagggtcccatccgggcccggcttaaagttcaccgcacgaaacgggttctcatgatattctttatcttttgtctcttttttgtacatcggaaatttcatgtacttttccatcccgtgttcctgacaataaatataattgttgtacgagccgtatcccgcatctgctaccggatatttcgggtaaaacccatacagttccctaaatttctccatcaacggcacaaagcagtccatatccgagcggtactgcttcacgtcgatgaccgctatatattcatccgccaccccgatctgaatgttatatgccgggagcagctggtcgtttcccatgtagtcctttttcatcctcataaacgtggcatcatggtccgttttggaatagctgttgcgttctggaccgcagatccggatctttttcacatattctttcagcttttgtgtgtattctttcagcttctcgtaatatctctgctccctggtctttcggtgtcccctgccgtggacaaacgctttttcgtcgatccggcactgaaaagcgtatcgtccaagaatcatctccagaccttgcggagtatattccgtgttcgtctcaaccttcagcccggtataggccagatcctcattgatctgacccaacagctgtgtgatctttgcaaacagccggtatctggatttttccgttgcttttttccatacccagctgtatttattcgcatttgcctcaaattttgagccgtctatatagagatgttccagatccacggcgtctttttttcggatatactccataacggcacggaaaatatcttcagcctttccgttgatttcatcatttataaagtgtccgaaggagcggtaaccgggtgtttcgtaatccatcaggtacatgtaacggatattggttctgcaccggtcctccaattcccttaaacttgcgtatcccgtgtccataaagccgaataagattgttttaagcatgttgacccgattatatcccggcctgccatagcggtataatggttcaggcctgagatactgttctattccgatctcctccatgatctggtcaaataccaataccggatcgcagatatccagactatctgcaagaaatactggaaatcttccctgctttggactataataagacatggtattgtttttcatgacagataaattatatcttgttggtggctgacgcccccaagcccccgtaaggaccggcgtaaatgcgccggtccttttaagccgccttcggcgtctgccgttacctgccggaagcggggaaatcattatcttgccccctgctggcggtcacgatttttctccgtttctgtcacacctaaaattcgctccacattgtttttggcagtgagcagttctaacattttttctcgtgcctgcttgtactctggataccgctttttgttctccaccttcaacatggcatactcctgttttagcgattgcatgggcggcagtttcttcaaaccgagggaatcaaagtattgtttggccgcttgacaggccgtgatttcactgctatgctgttcgtaaaatttctcccttttcctgcccgtcaatttccgatactgtgcgtaaatctcccatgtcttaccgtaagcgccgatgtgcttttgcagttcggagatgtccttcattcttgcgctggcggctttcgtccggtcagctaaatcgttgaaattctgaaccgccgcatcacaggctttctccaattctccaaggtcggtcagattgttttcttgcaagtacatgaccgtttttgccatctctttgagattgaaaattttcgcccaccgctcgaatccgggagagttggcctgctgcattttcgattgaatatcaatcagcaaattaggcttggacttcaccgccgcctttgcccttggagtgacaatccgtttgccggaaatgcgctccataatcgccgtttcagagtaatccacgccgagggaatcacagcggagaaacctcttgccattggaaattttgaacgcaaggtgtttgccctgttttacctccacgcccgccgctttcatggcggcgaggaagctgtcaaaatccttgcagccttgaccgagggcggtgtcaatcaggacctccaactgtcccctaatggtaggcgctttatcctcacctaaccatgtgccgtagctgccccggctgggcttcggctccgagatcaccgacagaccattttccaggcacagcatatcggagattttacgaattgcaaatgaggaccgccagaagtttcggaattttcgagtgcagtctatggcagtcgagttgaacacgatatgagaatgaatgtggtgtttgtcaacgtgggtgcagacgatgaaagcgtgtttccccttggtcagcgacatagcgagatcatagccgatcttgtttgccagttccggtgtgatctcccccggcttgaaggactgccgcatgtggtaggcgatcacatcattgtccttccgttccctgccggtaatggcagcatactgccgtttggaaaataaaaactcctggtcagcaatagacgggttacactggtaggccgtgaccaaatcgccgccgttggttttctctggattctctacataggccgtcacccggcccagggcctcggccacggttcggcccatgccgctgtgcagcggcatcaatcgtgttgttgccattttctaaacctcccgcaaaaagaaaaaggtggtgaacgaaaaatcttcgcccaccaccaaaccgctatttgattttcgataactgctccaatatgctgccgaacaggccgctgacctctgtcagcttgccgcagatttcgtccacctcgtcaggatagacaccgccgccggagttgacccggcgggcgatctggttcacattgttggacgtgtaccgcaggagctttgtgcactcgtccagctctttgatttgcagttggacaatgtagccgtcaatacacagcttccgaatataggcgctcatattgtgaacgcccatcaacgccatcctctgttcgattaagctccgttcctcgtctgtaactttgaaatagataccgctggtcttctcttttgccataatcccccttatctccgcttctgccatacgaggtcatagccgagagcgtcagccagctcgaccgcttccttatagcgcaaggattcacggcgcagcttgtcggagaggttcgggacgctgggactccatccgtattgctccgttagcttttccactaactcgctcatggtgaagccctcccggacaatataggctttgatttcgttcctgatattcataaaaattgtactcctttctactacaatatatttatggttaatatcccttacagccagtaaggaattatccatcttattgcttaagctgttataatgatggagcaatcggtatatcggcttcctttcttggacttcgcgtccgtaaattagactgataaccagctcctcatttgcagcgttcgttttatgcaggttgaactgcctcaggtacgttcgtgtcacaccacagtagatagaataggcaatgagtaaaactggtacttatccattgcaataatcttaaggagcgacaaatttatgaacatgaacgcagttggtattgatgtatcaaaaggaaaaagtatggttgccattctccgtccttatggagtaatcgtttcttcaccctttgaaatcaagcacacttccggtaacattcaatctttgattgagcagatcaaatctatcgatggtgaatcccgcatcgttatggagcatactggtcgttactacgaaccactggcccgtgagctttctctggcaggtctttttgtgactgccgtaaatcccaagctcattaaggatttcggagataactctctccgtaaagtaaaatctgataaagctgatgctgtaaaaatagcccgttacacacttgacagttggacggaattaaaacagtatagtcttatggacgaaatacgcattcaattaaagactatgaaccgtcagtttggtttctatatgaaacacaaaacagccatgaagaataacctcattggtattcttgatcagacttacccaggtgttaatgcttactttgacagtcctgcccgtgaagatggcagccagaagtgggttgatttcgccgctacatactggcatgtggactgtgttcgtaaactgtcattaaacgcatttgtcgaccattatcagaaatggtgcaaacgcaggaagtacaacttcagcaaagacaaggctgaagaaatctatggagctgccagggagcttgttcctgtacttccaaaagatgatctaaccaagctgatcatgaaacaggccatagaacaattaaacactgcttccaagaccgtggaagaactccgtgctctgatgaatgacacagccgccaaactaccggaatatcccgttgtcatgggaatgaagggtgtcggcccgtctctcggacctcagcttatggctgagattggagatgtcacacgtttcactcacaaaggtgctatcactgcatttgctggtgtagatccgggtgtcaatgaatccggaacctatgaacaaaaaagcgttccgacttccaaacgtggctcttcttcccttagaaaaaccttattccaggtcatggactgtctcatcaagacaaagccgcaggatgaccctgtatatgcgtttatagataagaaacgtgctcagggaaagccttattacgtctatatgaccgcaggtgctaacaagtttctgcgcatctattacggaagagttaaagaatatctcacatctcttccagaataaggaataccacatcctttcagaccagcggataacggtggtctatttggtgtacctgaaattcagtcaacaataaatttaaaatttttttcatttttctattgactttttatttgcaggctaaattgtgttcgccctccggcgtaggaatagaaaacgctcccagcaaaccgggcaggtcgttcaccatgcccaggtcacaggagcgcacatcgaatttcagcgtttagcgtaaagtcatgcgaaatggtgaataccagcaggggaagacgtattgcgttcgccgcttggcgttgcgtgtttccacgaaaaagcgttatgctgatactgttttgttcgctgatttcacatagattgaaatttagggcgaaaaaaggggtggtccgcagaccgcccctttttgcagcatattcaaccctgggcctctgccgcccgctttttcttctcacgggaacgcctggaatattcccgctgtttctcccgaatcttccgtcgccgctcctgttcctccaattcctccggcgtaggttccgggagcggcacatcgaattttccgataaacttcaggtaaatatcaacttcctgcatccgttcgccattgaacctgtccggcgcgtggacaacgatcttgtccacgaactccaaaatcatcggcgtggtcagcacagagaagtcagcgtaccgcttgaccaaatccaaaaactgaccggcccggtctgtatcggcggcgaacgcatcaagcgcagcctgttcccgttcaattgccgcatccaattcttcctgctcacgctcatacccatccgacagcagcttgaatcgcttctctgtcagactgcccgtggcgaaggattcatagagcttttgaatcagcccatccagctcagaggaacgcttgcggtcccggttcagcttgcgtttcagttcctttgcggcgttttcctgccgaagctgggaggcggcgcgaatcttttccataaaccctttttcatcagagatagcgtaggtactgactgtcctgatagtgtcaagcagcaacgcccgaactgctttcgtagagatatagtgactgcaacacttttgttctgactgttttgcggtcagcatataggtggcgcaattataattatcgccagcataaagaccgctttccgggtcaggcttccagccctcccttaatgccctgccgccccgcttatgattatacatcctggctccacagtcggcgcagaacatcagcccagtcaggggattggcctcgcccgtggtgtccgtccggcgtaccgtctgccgtactcgttgggccagcttccacgtctccgggtcaacaatggcctcgtgggtattctcaaaaatcagccattcctccggcggacgcttaatcatcttcttgtctttgtaagagggcttataggctcggaagttaaccgtgtggcccatatattccggcttggcaagcatatcccgaatcgtggcatccgtccagtcataggggcgggacatatccgttttgctctggcacgttccccgcccccgttgggcaagatagtaagagggacgctccaccttatcttccatcaggattctggcaatcgcaagagggccttttccctccgcactcaaatggaaaatgcggcgcacaacgtccgctgcttcatcgtccaccagccagtggtgcttttcatccgggtccttcttgaacccatagggaatcgtgttggtgacaggcttgccggacttaccccgtatctgatactgtgctttttgcttgcggctgcaatcgcgcacgtaccactcgctcataatgttgatgaacggggcaaactcccccgtactctggtcctcgctgtccacaccgttagagatagcaatgaaccgaacgccatgctgtctgaaaagaacctcggtatagaagcccgtttgcagatagtcacgcccgacacggctcatatccttggcgatcacacagccgattttcccggcctcaatgtccgcaacaagctgtttccaactgggccgctcaaagttagccccgctccatccgtcatccgtgtaatgggaaatattagtaaatcctcgctgggcggcatagctttcaagcatggccttttgattcacgattgagttactatccccaatttgctcatcgtcacggctaaggcgctcgtataatgccgtaatcttctccgtctccaaccgcttctcgttcatgttgaactcccttcaagcggctggctcgtttgtggtatccctattgtaccacagtcagcaacctttgtcacggctccgcgccgaaatgaactaccccgcagcaagctgcggggtatcgaaggttgcaacctctacatataatcccatatgctatactgctttgttttctctacgtttttatagattgttttataatttttttcctgtccctgttctttcacatatctacttatgatttgctcattcccatgttcactcaccgttgctacgtaatagccatctgtccagaattctcctccccacaattttttcttcacttgtggacatttcgcgaacacctcccgggctatgatgctcttcactatttggatgattttttttggactatatgcaggcactgactggataagaaaatgtatatggtctttatctgtacctacttccaaaaatcttatttcatacctttcctgaattccctcacacgtttctttgattaccctatctacatcttcatctattactactcttctatattttgctggacatacgaaatgatacatgagtactgatacattgtgtgacttgcgtattgtttcactcatcacacaatttctcctttcctttttcctctagtatatcacttcctccatgtcttgaaaaagtttgttacgcagcaagctgcggggaattaaaccctctttttgattaaatgcagaattttgtcgttcatggtttcctgggcggtatcgctgaaatggacacgcaccttgtaggtggtagacccgatacgccggtagagaatggcggtgttctccgctgctggttgaattgtagctatattttgccttcctttcttgcggtaggccgcaacccgtgatatgatgttggtggacttgtccaggcagcagaaaaccagcctccggctgcataatgtcgtttgcagtcgaaaactggcttgattgtgcctatgtacttttgtcgtgaaaggacgatggttttcacagcacccaaagcatcccctcactaataggagaaaaaccgggggcaaagcggaaccattttcaaaaagaatttgaaaatttcttggagcggcccagtttgttcgcccatctctattatacggtcaagttggccatgaccgcaaaaatatggcgataatgcaagatttgaccgtcaccctcgaaaaaattgcaaaaatgcaagattggatagttaccaacgtgaccgacattttgtcggccacgttgttgacaaattgtccgtttgcgtctttggcctgcgtcattgtgccgctgaccagaaccaggacgaaaaattttcgttctgattggtggcggtcaaaatgttcggcaccagcagaaggaggtagcggcacatttcgccgccacctcccaggaagatcaagattgcaaaatgcaaacttggtccctggtacaacgtggcggacattttttccacgatgttgccaaaatcagaagtgcattttgcatttctgattttcaaaggcgcattttgcgcctttgaaccgccgcagtaacgtgaagtgcaaaatgcacctcacgtcaagcgggttcgagcgtcaggctgacgctcgaagctgtgtgttattgctatcacccctcccatagcgctctcattcaccacaaacgagcaagccgctatgttgtattaggtgaaatctcatattcaccctttacaacatacatctttataccaatttgcggaacctgattgctgaataacagggcacaaaggattctcatatttcaaatgtgatgataatacgttgtcgtatttttcatcttcgcttaaaagtgtaaaagtttaaagtaataaagtattgacatttcagacagagtcgcttacactattactgcatatgaatcattctgaagaatacatactatggtccatacaatctgtatatttataaatttgcataaggagtactgaattatgattatcattatgaaacccaatgcttctgatgaagcggtgaaaaaggtaacaaacctgattgaatccaaggggctcacagcccatctgtccaagggttcccaggttactattgtaggtgtggtaggcgacaagaccaagcttttggacaccaacatcgaaatcagcgaaggcgttgacaaggtagtggctgtcacggaatcttataaactggtcaataaaaaattccatcctgaggattccgtgattccggttggcaacacccacatcggtcccggcaccatgacggtgatggccggtccctgcgccattgaatccctggaccagcttttggagaccgcttacgcggtgaaaaaggcgggagccaccttcctgcgcggcggtgcctacaaaccccgcacatccccctactccttccaggggctagaggaggaggggcttaaatacatgaaggctgccagagaagccacgggcctcaatgtaatctgcgaagtcaccagcgcccatgccattgagtccgctgtgaagtatgttgacatgctgcagattggcgccagaaacatgcagaactttgaactgttaaaggaggctggcaaatccggcactcccgtattgttaaaacgcggcttgtgtgctaccattgacgaatggctcaatgctgccgagtacatcatttccgagggcaaccccaatattgtgctgtgtgagcgcggcatccgcacatacgaaacttccaccaggaacaccctggatatcagcgctgttccggtcatccgccagaagagccaccttcccatcatcgtggatcccagccacgccacaggtgtcagagcctatgtggaacccctggcaaaggcagccattgcagtcggagcggacggccttatgattgaagtccacccctgtcctgccaaggcactgtccgatggtccccagtctctgacctttgatgcctttgagcagctgatgaaggacctggctccttacgcagagctgtcaggccggacctttaaggcacagtaacagaactttacggcactctcacttcagggagtgcttttacatatgcccgatgcgcgtccccggccgttacggcatccgcttttaatatcttaaatacggcgcatccggttcccgcatttacaggaggagataccaatatggaaaaaataaccatgaccgattccaccatcgcattcatcggactggggcttataggcggctccattgcccgggctatcagaaaaacacggccggatatccgcatcatggcttacatgcgttcccgctcccgtctggagcaggcccggcaggaaggaatcgtggatgtgattctggatggaattgatgagaacctgcgtgaatgcgaccttatattcctctgcaccccggtggaatacaacgcgggctatctctccgccatacggccctacctgaagcagggcgccctgattacagacgtgggaagcacaaaatgcggcatccatgaggaaatcagacgccagggcctggaatactgctttgtgggcggccatcccatggctggctcggaaaagaccggctatgagaactctacggaccatctcctggaaaatgcctactacatcgtcactcctcctgagggaaagaacagttcccacccgcaggctttaagccccaatgcagaacgcatcatggcggtggcaaaagccatcggcgccattccccttgttctggattacagggaacacgacaaggtggtggctgccatcagccatctcccccatctggtggcttccagccttgtgaatctgattaaggaccacgacacagcagacggcaccatgaagcaggtggcagcaggcggttttaaggatatcacccgaattgcctcttcctcccctgagatgtgggaacagatatgcatgaccaatgtggagccaatatcggacatactggaagcatacatcgcatctttaaacaaggtgctggaggaaatcagagaacataagggacaggatatctacaggctgtttgagacctcccgtgattaccgcaattccattacagacaaggccaagggatccgtggaaccgtcctatgagttcaccgtggatgtaaacgatgaggtgggcgccatttccaccatatccgtcatcctggccgccaaaggcatcagcattaagaatatcggtatcaacaacaaccgcgaacgtggtgagggggcactgaaaatcgccttctatgacgaggcttccatggaagccgcatggcagaggctggacaaatacaaatacgagatgtttagcatgtaatccggagagaaaggtcaggtaacagattatggaattgaaaagagcatcccatttaaagggagaaatcagggtccccggagataaatccatctcccaccgggccgtcatgttcggctccattgcagaagggcttacggagatacacaatttcctccagggagcggactgcctgtctaccattgcatgttttgagaagatgggcattgatatagaaaataagggcggacaggtgctggtccacggccgcggactgcacggactgaaagcaccccgggaaatcctggactgcggaaacagcggcactaccacacgtctcatatccggaatcctctgcgcccaggaatttgacgtaactctcacaggtgacgaatccatctgtaagcggcccatgaagcgtattatggacccccttaccatgatgggcgcccatattaccagcataaaaggcaatggctgtgctcccctgttcatcaagggaggcccggtccacggcatccactatgactccagggtagcttccgcccaggtgaaatccgccattatgctggctggtttatatgcagacagccccaccagcataaccgaaccgtatgtgtccagaaatcattctgagctgatgctgcggctctttggcgcccaggtatccaccgaaggaaccacggcagtcataaagcctgccagtgaactccatggcaatcaggtcatggttccgggagatatttcttctgccgcctatttcatcgccggaggccttatggtgcccggctcggaagttctgatacgcaatgtgggcatcaaccctaccagggacggtatcctgcgtgtatgccgtgatatgggagcgcacattgaactgctgaatgtaagcggaggaacaggagagcaaacagccgatatccttgtacgccacggcagccttcatggaaccgtcataggcggcgccgtcatacctaccctgattgacgagcttcctgtcatcgcatccatggcctgtctagcagagggtgagaccataatccgggatgccggagagttaaaggtaaaagagtccaaccggattgcggtcatggtccagggactgactgccatgggcgctgacgtgaccgagacagaggatggaatgattatccggggcggcgctcctctccacggagctgtcatcgacagccgcaaagaccaccgtattgccatgacatttgctgtcactgcgctgtgtgcggatggcatcacagagataaaggacgctgactgtgtcaatatatcctatcccggcttttacagcgatttaaagaggctggcgcagggttaagctgaaaccgcatccgctccggctcattctggggatggatgcggttttgttttgatgatacggtactgcgcgctgtccgctgactcctgtcattttgccaattcacagagctttgcgctgtggtccgccaccacgattttaaggagcttgatatcgttctccatggcagtttgcttctgctctgactcctgataccgcctggcggcaggtacatagttctcagccagaagctggatattgggtatcagctggttttcaatgattttggatgtccgttcctgctgcttcctgatatcttcgatgtccgcctctacacggcccatcctgtctgtcagcgagaggacctgttccttcaggatggtgatgtcagcacggattggagccagtttttcatccagcttccgctccagtttttcatccagcttttgttccagtttttcgtccagcttctgttccagtttttcatccagtttctgttccagcttctgttccagcttttcctccagtttctgttccagcttctgctccagcttttcctccagtttctgttccagcttttcctccagcttttcatccagtttcctatccagcttttcctccagcttttcatccagtttcctatccagcttttcctccagcttttcctccagcttttcctccagcttttcctccagcttttcctccagcttttcctccagcttttcatccagtttcctatccagcttttgttccagcttttcctctaacttttcttccagcgtttgctccatcgccagttttagctttatctccagcctctgctctgactgtatcagtttctgttccagttttttctccagcttatcatccatcataccggatatagccaacaataaatcttgattattcaacaattccactcctccctctttctttttattataatcatttttcgaggccgattcaatatgtatctctgtttccggcctcactggtttcgctgccggatcgtcgccattggcttgttcttatgggcatcacctgtccttcctgtgtattccctgtgtcttttctgtgtgattccaaatatgagtttgatgtgatttcagcagccgaaagggccggacggaataagattcctaaactgtatcttaggatgcagcagattgccggaatacctgaattatccagcagaagtaaattcactttagcaaaaaaggaaacccgtgtcaagacccaatgtcattaagttaagatggcaagaaccaggctctctatattagaaatggtagataaaaagaatagaattcttgaaggcagatgcaaatctgccttttctgtgttacctgcaaatagaaaaaaggcaaaagaaataaatctttaaccttttttcaaaacctaccccagcgctacatccagtatcatcatcaccacaaacccaacggcaaatccaatggttgccacattggaatgctctccttcgcctgactccggaatcagttcctccactaccacgtaaatcatggcgcctgccgcaaaggacaggaagtatggaagaaccgggcctaaaaactcagccagcaccagcataaggacagcgcctatgggctccaccacgcctgaaagcgtgccgtaaataaacgccttccccttcccggccgcttccttaagaggcagggatatgatggctccctccgggaaattctgtatggcaatacccacggacagggccagcgcgcccgccagggtgatcgtcccgttctgtgacagaagccctgcaaacgcaacgcccactgccattccctccggtatgttgtgaagggtcaccgccagcaccagcatggtactctttttccagctgctcttcggtccttccggctgctctgtatcaatgtgcagatgaggtattatctcatccaacagaagcaggaaaccaattcccaaaataaaacccacggaagcagggatgaatgccagcttgcccatgtgcccgctcatgtccatggacggaatcaaaagggaccagacagaagccgctaccattacacctgacgcaaatcccagaaatgccttctggacgctgggcttcaatgcgtctttcagaaagaacacacaggctgcccctgccgtggtcccgataaagggaatcatgattcccgcaaatataccgctcatctcaatacacctctgtcatctcctgagccccggccctctcttctacaggaatcctttgagcttcagatagtcttttatcagttgaatcatctggtcataatcaatccggctggcattgatgggaagatcataattttccatatccatccactccctgccggtaaagtagcggtgatactccgtcctctccttatcaatccgtctcatcctgcggagagcttccgcctcatccaccttatccacgtccatgaccctgcggattctggtgaccgtatccgcatacacaaagacgcgcaccagattatccatctggtcctgaagcacatagttgccgcagcggcctacgataatacatgtctcagaggctgccagcccgcggatgaccgatgactggaaacggaacaggttctccggcgaagtaatgtttgggccgtccttatccggttctgtcagctccggcttcatgctggtcactatacggtacagcagattgtttcctgccctttcatcagccagcctgaagtactgctcccctatggcgctggtctcagaggtcatcttaagtatctcttcatcgtagaaatgaatgcccagctcctcggccaggcgtttgcctgtcaggcggccgccgcttccgtactggcgttcaatggtaattacaaaatgcttgtcattcatattgagtatcccccttattcctaatccacagccgtgcccatgacagggccgtggtcgctttcacgtctatacaatgtctatgtggcacatccccatggcgctgagggcattgtgatggctttgaggcgttacccccgcgcagcaggccccatccacctgtatggatgtatcaggaaccgctgccttgagcagcatggcgttggatataacgcagatatccgtgcacaggcccaccagctccacaaaatcatactgtcccccggctgcgtaatccgccagttccctgcttccaaaggtatgcttctcaaaacgggtccctgaaattcccctgagctccggtatcagttcccagcccggcgttcccttgacgcaatggaccaccggaagctttctcccttccatggtatccatataatcgtcaaaatgggtgtccagggtaaataccacctcgtctcctgcatcctggtacgcctttatcttatccagcacatgagggacaatggcctgggcctcaggactgcccaaagctccatccacaaaatccttctgcatatccaccaccacaagtaaccggctcatagaactttcctccttgttgcgaacacgttttattgtaaacacctttgtttggaacccaaaatgttcctttccacacctacagtctaccacatttcatcaaccaataaaagttcttttacacttttgtgcgacattacatgactttatatgaattttcaaaacactcttgacaaattcattttattgtattaagatacggattaataaaataaaccgtagagaaagaggagtaagctatcaaagctttaacacagagagccgcaggcggtgggattgcggtatagggctggcagctgaatggacttttgagggcggtcttgaaggattgtatcatctgtagggaccgacggattccgcaaccgttatacatgcggcgcatatgttggtatgtgtaaagtggactttttagtcaatttgagtggcaccgcggatttcattcgtctcaatcgtagcataagctatgattgggacttttttattccggctttattcaaacagcaccccgtcagaaagtcccttatccaacgacattttttatcatccaaatatagtttaaaaacaggaggaaacaagattatgaaaaaaacaattgcaatgctattaaccgcggctttaagcgcatccctcttatcaggctgcgtctccactgcccagaacaccaccgcagcccagtccgctgaagcctcgtccgctgatacatcctcagccgacggttcatccgctgacaagaccggtgagtccacggcagaatcttctgctgacagcgcttcctacaccatcggagtgggacagtttgcagagcatggttctctggacaactgccgcgaaggcttcatggccggcctggcagaggaaggcatcgaggagggcgtgaacctgaccgtgctttatgataattcccaggctgacggcggtacggccagccagattgcaaccaatttcatcggaaagggcgtggacctgatgtgcggcatcgcaactcccatggcgcaggcagagtacggcgtggctaagaagtcagacattcctgttattttcactgctgtaaccgaccccgtagccgcagagctggccaatgcggacggcactccggtaggcgaggttacgggcaccagcgataaacttcccgtggaggctcagctcaagatgatccgtgagattcttccggaagcaaaaaatatcggcatcatgtacaccaccagcgaagtgaattctgaatccgccattgccgagtacaaggagctggctccccagtatggttttgaaatcgtggacacaggcatctcctcttccgctgatatcgccctggctgccgacacccttataaacaaggtggactgcatcaccaacctgaccgacaatacggtagttgcctcccttcccgttatcctggataaggctgccgccaagaatatccctgtattcggcagtgagattgagcaggtgaagattggatgcctggctgccatggggctggactatatcgaactgggcaggcagacaggaaagatggccgcacaggtactgcgcggcaagaaaaaagccagtgaaatgaattacgaaaccataaaggaagccgccttctacggcaatacacgggtggccgggaatctgggcatcacactgccggaagatttgaccaaaaatgcaactgagctgttcactgagattgcccagtaaagctctatcattattatctggaggaacatcatgacaacgattattttaggtatctttgaagaaggcctggtgtacgccatcatggccctgggcgtatacatcacataccgtattctggattttccggatctgtccgtggacgggaccttccctctgggagccgcctttaccgctaccggcatagccggaggtttcatccatccgactgcggccctccccctctcctttcttttgggagccgtggcgggctgtgtcaccggacttatccatgtcaagctgaaggtacgggacctgctgtcgggaatcattgtcatgaccgccctctactccattaacttaagggttgcgggcaagtccaacctgcccattttcagcaaagatacgattttcagcaatccatggctggagcgcaccatcccccaggcccttaagccctatacagtgaccatcatccttctggcaatcgtccttatctgcaagctgctcctggacgcttacctgaaaacccggtccggctatcttctcagggctgtgggcgacaatgatctgctggtcacctccctggccaaggataagggcatggtgaaaattatcggcctggccattgccaatggatttgcagccctggccggcagcgtgtactgccagcagaagggattctttgagatttccaccggcacaggcacgattgtcatcggcctggccaatgtcatcataggcactcagctgttcaaacggttcggcttcgtgaagtccaccacggctgttatcataggttccatcatctacaaggcatgcgtatccctggccctgctcttaggcgacttaaggcttacctttggaagcattactgtctccttccctgtgacggcctcggacttaaagctgattacatccattttattcctcatcatcctggtggtaagctcctccaggggaaagaaggtaaagagccatgcttgagctgaagcacatcaataaatactacaatgccggtacagtcaatgaaatgtgcctgtttgaggacttcaacctgaccataagggaccatcagtttgtgtccgtggttggaagcaacggctccggcaaaacctcacttttaaacattatctgcggcagtattcccctggatgagggacggatcataatcggcggaaaggacatcacccggattcctgaatacaagcgccagcgccgcatcggacgggtttatcagaatccggccatgggcacctgccctaccatgaccatactggaaaacatgtctctggcagacaacaagggaaaggcctttaacctcaggccgggaaccaaccggcagagactggaatattaccgtgaatccctccgttcccttggactgggactggaggataagatggatgtgaaggtgggagtcctttccggcggccagcgccaggccatggcccttctcatgtccaccatgactcccattgagtttcttattttagatgagcacacagctgccctggaccccaagactgccgagaccatcatggagctgaccggaaagattgtaaaagaaaaaaaactgaccaccatcatggtcacccacaacctgcgctacgcagtggaatacggggaccgtctcctgatgatgcaccagggccgcgccgtggtagacaaagaagacgaggaaaagcaggcgatctgcattgacgacattctggaaaagttcaatgaaatcagtatcgagtgcggcaattaaacttaaaaatcagacggaaagaggacccggaaaccgctgtcccgcagccgtgtatttatgtctgaactgcatatcatatccggggacggccagctgcggtggattcatatatgcggcgaactccttaaagcggagcaggaacttccctgcctccgctgtattttccacaatgtaacagatgtcagggacaggcaggaagacggataaggcatcggcgccggacaacgcggtcagcttcagcatcggagtcagcttttatcctgaccatggaaggaatttttcctttctctttgaaaaggctgacgaagtcatgtaccatgccaaacgaagaggcaaaaaccaatatcacatatataaggaagatgcaccagagacataagattcccggctgggacgggaatggagattataacggcgcaatataaaagggctgatgtccggctaagaacttatgccgggcatcagcccttctcctgtcctgtaaaattccctgacgggattttaattattctgcaaataacataatcttggaggccgtgttctcatcatctgaccagaccacacatttctttccctgcgtcaggtcatccagagtcacgatgttcctggtgagatacgggaagatattgcagtcctccgccagtgtgaactcggctccgtccgcggctgtcagcacggatttggatgtggccgcatctgtaaccatggacttgacttccacatagtcaggcgccttggcgtctgccggaaggtttgtgaaaatcatgacggcattggtcataggcggaaggctcatagtcatggccggccctatgtaggcgtaaatggtatctccgtccttcacatcctccagagctaccgggagacctgtcatggcgtccaggatataggtcatatcgtcagccacattcaatatgatctcgccgctggtactcatgccggactgattgtcaatggaaagccttccgtcctccatctttgtcacaggtccgtaaatccggatggactggggaatctcaggctggctctcttccatactctcaatggctccggtaactgattccactaccgtggtgtcattcatggtggtctcttccttattcgcttctgctgtcacggagctatcgaccgttgtctcggcgttgacacctgccgagcatccggctgctcccagggctatggctgcacaaattcccactgcatataaatgatattttctcaacattatcttctccttttcatctgcctgccggaagccatgggcctgccggaaggcacctgttatgtctgtatgagaagtatatatcatttactgtccatatccaataaagtatttcttaagaattctgaatttagaatgaaccttatgacaaatgttacaaaatgttttacacaaatacggtttatctttaccgggccatctcgctctgaggtcccgcctggttatgggcgcggataatagtctggatttcctccaggttggaagatggcagatctccggggatggtgttctttacagcagccgtagcattgccgaaagcaactgccttggcacagtcgccgcctgtactgagcagcccgtaaagagctccggatatataggcgtcgccgctgccaatccggtccaccacctcaatatcccgatacggctcttcctcatagtactcatcctttgcagcatcgtatatcacagagccaaaggtgtggcgtttggggctgtggacgattctctgggtggaggctacgatggagatggggaattcctcggtaaagctcttcatcatctccctggccgtccccgtctttaagaaggtaagcctggcggtgtcctcggaacagaaaaaaatgtccacatagggaaggattctcaggatacattccctggcctggtcccctgtccacagattccccctgaagttaacatcaaaggataccagggtgcctgctgccttaaaccgcttaatcatctctatggtggtctcgcgtatatccccgtttaaggccagggtaatgcctgtggtgtggaaacacttggaagccgtgtacacctcctccggtatctcgtcaatatccagggagaaaaaagaactgtggttgcggtcataaatcactttgggctttctgggataagcgccgttttcataatagtaaatgccaaccctggctgcggaggactggtcatacataaagaagtcgtcgctgaccccgaaggaacgaatctttcctttcataaagcttcctatatcatgggccggaagcttggatataacgcctgtgtgaagtcccagaagggccgctcccactgccacgtttaactctgccccgcccacctgcttgacaaaggtgtcgcctctggacagacgctcgttatctgggggtgacagcctgagaagcacctgtcccaaggtaagaaggtcaaaattcctgccgtttgtctctaccatatcatatctccttgtcatataagaaacggctaatacctctgaaaaggattagccgtctctgatttctgattgtcaatatcctgatttatctctgaacacggcctgaaccgtcgccgccggccagattctcaacatctgccctggttaccaggttgaagtcgccgggaatggtgtgctttaatgctgaagcagctactgcatactccagggctgccttcatatccttgccatccaccagaccgcagattaaacctgccgcgaaggagtcgccgccgcctacacggtcaacgataggtgtgatgtggtactttctggaatggtagaactcgcgtgtctttccatccatgatgcaggcagaccagccgttgtcggaagcgctgtggctctcccgcagggagctgatgatatacttaaagccgaacttatcagccatctggttgaaaatgtcaacgtatcctgccagctccagctcgccggaggtaacatcggtgttgcccggcttgaagcccagaaccttctctgcatcttcttcattgccgatgcagacatcaacgtactgcatcaggttggtcatgaccttctgagccttctcagaggaccacagtttcttgcggaagtttaagtcaacggacacggttacattgtgtgccttggctgcctttaatgctgcctcggtgagctcaatggccgcatcgctgacagccggtgtgattccggtaaagtggaaccagtcagcatctgcaaaaatctcatcaaagttgaactgatccgctgtcgctgtggagatggagctgtgagcacggtcatagaccacgttggaagctctcatggcagagcctgtctccaggaagtagatgcccagtctctcgccgcttctggcaatgtgctttgtacctacattgtactttctcagtgcggccactgcgcactcgccaatggggttagccggaaccgcggtaatgaattcagcctcatgaccgtagtttgcaagtgaaactgccacgtttgcctcgccgccgccgtaattgatgtcgaactcgtctgcctggatgaacttctcattgtttggggtggataatcttaacatgatttcgcccatggtaacaatctttgccattgtataattctcctttaatctcttcttaatgatatttggaataattcttatatacggtaaaatctatgcccttgccgctgcaacagctgccacgaactcctgtgccttagctgtaacggctgcaaagtcgcctgtcttggcaccctttgtcaggctgcttcctgttcccactgcgtaagcgccggccttgatccacttgtcaacattatccacgtctacgccgccggacggcatgaactcgccctgtggaaggggtcccttaaaggagctgatagctgcaggtcccacgatgttgcccgggaaaatcttgataatgtcacagccggcttccatagcggtgatggcctcggttggagtcataacgcctggcagcatgggcactctgtaacggttgcacagacggatggtgtccacgttaaggcccgggcttacgatgtagttggctccggccaggatgcaggcccttgcagtctcaggatccagtacggtgccggcgccgattacaatcttgtcattgcctttatacttttcagccatcagtttgatgaagccaaccggatctccgtcatccatggtcatggtaagctcgatgaagttgatgccgcctgcgatgatggcgtcaactaccttctcgccctgctcatagttctttgcgcgaacaacagcaaccagacagtcttctttcattcttgctaaaacttgttctttcttcatcttcattctccttctctttaaattcgcatatgcgaatcaatttcataattacgatttgtatatttaaattctaatcgctgtcacatgatttgtcaacagcaaaacaggtaaaaatgtaagtttattttcctatacatgtctgatgtatcccagcagacgtgacagctgggctcccttatcgcttaccaggcgtcccagggcatcataatcctctgtgggtttatacaggctggagacactgatggctcccatcacattaccatcctgcccaaatacgggagctcctacacattccatgtgttcttccagttccctggcgtcaaaggcgtatcccttttcccgcacagactcaagctccctctcaaattcttccctggtgcatatggttctatccgtgtgcttcttaaaactgatgcgggacaatacgccgtcccggtcctcatcctccgtgtaggccataatcgccttgccaagtgatgtgcagtaaatggggttcttcgttccaacagtcgccgtggtgatgatgggattctccggctcaaacttgcaaatatacacaatggaatcatccgaacgtatcccgaagaacacggtcttccccacctctttggaaaatgccttgagcaccgggtcaatggtactgataaagtccaggttatttgtatagttaattccaatccggtaggctgtcaggccgatggtatatctctgcttctgctcccttgccacatgaatcatgccggtctgtaccagagtggtcacgatatcgtaggcgctggtcttaggcatgtccagctttgcgcatatctcatccagggtaatgccgtccggctttttcgacaccaatttcagtatctctacggtgcgcagcgtggttctgtttagtttcatggacacctcctgcttaatcattcgcatatacaaattttatccgtatatacgatatccaatatccagtatacctcagacaggcaggagatgcaagaagaaattacaagaattgccgccataaaaaccgttttttccctacagcgtcactccctgtttaaaaatggccatgtcatgaaatccggcttcctctgatttgaccttccttccggatgcaacagccaggacgtaatccagcagctcctttgccagttcctcctttgtcatgtcctccaccatacggcccgcgttaaagtctatccagttgtccttatggcctgccagcctggagttgctggatattttaaccgtaggcaccggggatgcaaagggggttccccttcccgtggtaaagagcaccatatgggcgccggacacagccagggccgtggaggccaccaggtcattgccgggggcgcttaacaggttcaggcccttcaccttcaccggctcgccgtactccagcacacctcttacaagggcgcttcccgacttctgggtacaccccaaggatttgtcctccagggtggagatgcctccctttttattgcccggggacgggttctcgtagatggtctggttgtggctggtaaaatagttcttgaaatgattgatcaggtccacggtcttgtcaaacagctccggggtggcacagcggttcatgagaagtgtctccgccccgaacatctcaggcacctccgtaaggatagtggttccgcccttgctcaccagcaaatcggaaaacgcgcccaccaccgggttggccgtgataccggacagtccgtcggatccgccgcacttcatgccgatgaccagctcactggcatctatcttctccctggaaaatgcgcccgcataggcagccagctccttaagaagccccatggcggtctccatctcatcctccacatcctggcactgaaggaacttcacgcggtcctcgtcgtacgctccgatgtagtccatgagtacgggaatgttactgttctcacaccccaatcccagcaccagcacgcctcccgcgttggggtgatgaatcatgtccgccagtacctttctggtattctcctggtcatcccccatctgggaacatccgtaagggtggggaaatgcaatcacgtcctccacatttccaaccgccagtgactttgcctggttctcaagggccttggcaatggaattcacacagcctaccgtggggatgatccatatctcgttgcggattcccgccttgccgtccggcctgcggtatccctcaaaatacacgtgctctgtgggagccacatcattttcctggggaacataatcataggtaagcacatcgcccagtgcagtcctcgcattgtgcacatggacccatgcccctgcatcgatatcctcctttgcgtatccaatcctgaagccgtacttcaccacttcctctccggcctttatgggccttaaggcaaacttgtgtccctggggtatgtcctctaaaaggctgacctttgctcctgccacatccagagccccgcccattgccaggggacgcagcgcaaccgccacattgtcattttcatgaatttttacaatatcctgcatggccattcattctcctatcatctttgttttctttgattttgtgtgcctgtctcttgtgtgctgtttcgtgacttattcttgtaagtgcttacaattattctactcattttcaggccagaagtcaataaaaaaatagaaaagtattgcattatccatagggaatatgtataatatacttagcttgtaagcgctttcagaatgtgaggttagtttatgaatatatatgatgtttccgagcatgcaggggtgtccatcgccactgtgtccagggtacttaacggcaatcccaatgtcagtgaaaagacaagagaaaaggtcttgaaagttatggacgagttgggttatactcctaatgtgttcgccaggggcctggggttaaataccatgcggaccatcggaatcatgtgttccgattcgtccgatccgtatctggcaggcgccatatactacctggaacgcggactgcgttcccacggctatgacgccattctctgctgcactggctatgacctggatgccaaacagaagtattttgatttgctgcgttccaagcgggtggatgccatcatactggccggttccaaattcgtggagatgcgggccaaggataatgcctatatcatcgaggctgcttccgaccttcccattatgctggtcaacggcttcctggaaggtgagaatatatacagcactgtctgcgacgatcacgcagcggtgtacagtgctgtcagccagctgctctcctccggacgcaggcgtatcctgtatgtatacaccagctactcctacagcggggtcaataagctggcgggatacaaagacgccctcaaggcaaagggcatcacgccttccgatgaactcatccgccagtgtcccaaggacatagaggctgccagggagctgctgctgtcccttcacagggaaggattggaattcgacgcggtcatcacctccgacgattcactggccgtgggcgctgtaaagtatgcccatatagcaggtatctccattccccacgggctgagcattatcggctataacaattctctgctggcccggtgtacggatccggagattacatccattgacagtaaggtggaagcgctctgcaccaccactatcaacactctaatgggggttttcagcggcgtgaatgtgcccagcaggaccacaatcgcttctgatttaataaaaaggaaaaccacaaatttttaattcttaaggaggaatatcacacatgaaacaatttatggacaaggatttcttattatcaactgatatggcaaagacgctgtatcatgattttgcagagaatatgccgatacttgactatcactgccacatcaatcctcaggaaatctatgaggaccgcaagtttgacaccatcacacaggtatggctgggcggcgaccattacaaatggcgccagatgcgttccaacggcgtggacgagaagtatgtaaccggcgacagcacggacagggagaagttccaggcctgggcagagaccatgccaaagctcatcggcaaccccctttaccactggagccatctggagctgaggaagtacttcggataccagggctatttaaacggcgatactgctgaggaggtatggaacctgtgcaactccaagctccaggaggactccatgacggtccgcaacctgatcagacagtcaggcgtgactcttatctgcaccactgacgacccggtagattccctggaatggcataagaagattgcggaggacgacacctttgatgtacaggtacttccggcatggagaccggacaaggccatgaacgttgagaagccggcctttggcgcttacatggcacagctttcccaggtcagcggcgttcagattactgattttgcatccttaaaagaggcgctcaggaagcgtatggcattctttgcgtccatgggatgctgtgtatccgaccatgctctggagtatgtgatgtatgtacctgccgctgactctgaggtggatgccatccttgccaaaggcttaaagggcgaggcagtaacaaaggaagaagagctgaagttcaagacagccttcatgctgtttgtggcccgggaatacaatgccatggaatggattatgcagattcactacggctgcaagagggacaacaacggctacatgttcgagaagctgggcgctgataccggatttgactgtattaacaactacgcccccagcgcgcagatggctgatttcttaaatgccctgagcaccaataatgagattccaaagaccatcctgtactccctgaatccaaatgataatgcttccatcggaaccatcatcggctgcttccaggagaaattcccgggcaaaattcagcagggatccgcatggtggttcaatgaccacaagaccggcatgaccgagcagatgacatccctggccaacttaggatgcctgggcaactttatcggcatgcttacagactccagaagcttcctgtcctacaccagacacgagtacttccgccgcatactctgcagccttgttggcggctgggtcgataacggcgagtatccggcagacatgaaggccctggaggaaatcgtaaagggaatctgctacaacaacgctgtgaagtattttggatttaagctggatgaagtgaagtaaactgaaacggcataaggggactgcccgattccatgggcaatcccctgttttgatcgattgcgctcacgttcacaccggtgaggcagattttccccttctcgcaaactgcaggaaggcggttaccagcccgcttatgcacagcattgcgtaaaagctgattcccctgcttaagagcatcacggaaaagctctggcctgtccccagaagggtgcggtacagcgcaagaaaactcccctctgaagcccccacggaaccgggaaggggtaccgcggtgaccgccaggctcaaaatagcctgaagggccaggacatcttttatttggacggacaggcccagagcccggcaggcccagtaaggaaccagatacagggcagtcagctgaacggcactatggatgaacattctgaccgccgccaggggatactgtctcagataggatcctcccctgctgtactcatcaatcaggccctccaccctctgcactgcgcgtttcctgttcttaatgattccggccctgctcagtgcgcctgcaatccacagcattgttttttccgccaaaagaccattgaggatgattaacaggataaggccggaacagaatccatttaccaatattccaaaaaccaggagcagccgtatgactctgctctggcccatgacaaagggcagattagccccaaccataacacacccgtaaaccagcaccgtcatctgatacaccgcggccgtggccagcagggaaaatgaactgtgggctgccccaaagccgtccctgaccatatagtaaagctgcatgggctgccctcccgtggctgagggggtgatggcactgaagtaaaaatccgtgaacgcataggaaagagagcgccagtaaggtacttttttcccgaaggtccgcatcaaaagccggatattagccgcctcacagttgacgaacagaaacatgcaggcaaaccccatggatacgaacctgatatccgccctcacgaaggtactgcccagggtctgggcggaattaccgctcaacagcacatagaatgtgaaccaggccagcaaagccaccagacagagcccaatggacatctccttccagttcatctttttctgtttcatcccagtttccccctttcctgtctgtttcttatcagtttcctgtttaattcctgttttagctgtgtctattataccgtccaattcttaaaaacttatgattaatttctgaatgtttttgtattttttatcatgtccctatgggtaaaaatcgagtaggaggcggtgattaaccgccgtcctctcacagcaccgtacgtacggttctcgtatacggcgctttcaatagttggtgtgcagagactgataggctgcggctaagtcataaaagccccagtttatcagtctttctttacttaatgcccagttgaccgccttgtttccggcattgaaccagtatcccttgcggtcgtaggctattgttgccgcataatggctgtctactcccagtcctatgagtttcctcattctggttttgggcagtttccactgtttccagatacacatccgtatccggcggtacaaccatccattcaggctttcgatgtttttcttcatgtccgctatcccatagtagttcagccatcctctcatgtagacttttatcttttccttggttcggatgatactcccgcacctgctccgggaagtaagcctgcgcagtttctccttggctttcttccatgacgttccatggacacggatataggtccctgttccgttcttcccaaaacaaaaaccaaggaacttaaaattttggattgcgaacacactgaccgttcggctcttttcccgattcactctcagtttcagccttgcctccagatatttcgtgctggattccagcagtcgttctgccgcccgttcgctctttgccagcagtacgatgtcgtctgcatagcggatacacggtacgccccgtctgtggaactcccagtcgaactcattcagatacgcgtttgctaagagtggggatagatttcctccctgcggggagccttccttcgtttctgtcacaacaccgttttccatcactccacttttcaggtaccgcttcaccatctgcaccactctttcgtcttttacttgtttcctcaacaggttcagcagtatcgtatggttcagcgtatcaaagtatttcgataagtcgagaactactgccctcgtgtatccctgttcgatatactcctttatcctgagaatggcgtcttttgctcctcgtcccggacgatagccgaagctgtctttcgagaacaatggttcgtagattggcatgagctgttgaagcattgcctgctggatgatacggtctattacggtggggataccaagctttcgtatccctccctccggcttcggaatctccacacgcctgactggagatggggtatacttccccttcctgattctctctaccagttcatagttattctccctcagccatggtaacgccgcttcaatggtcattccatccactcccggcgctcccttgtttgccttcactcttttgtaagccctgttcagattttccttgttcagtatcttacttaagatgtctggctctgcactgtctctttccttccatatccggttgaatgagcggtgcgctctcacataccctttgcgttccgcgctatctctttgcgagcagctttctctgttttctgtacccatctgcccattcctcctttccctgtcgtactaaagactcctattgattcggtccttcactgaaaacagctactatgacctctgctgacttctgtacgctcagcattacctctcggcaatggttactcctttcagagcattccgtacagacctccctgggtaccacacgtttctttccctccatctatctgccgcatttactgtacacgattccgtgtagctatcgggcttcatcttgtgttgcagacttaccctcatgtacagccttctatacggtttctgtccgtcagaccagaggtttgcccatgggttcgttccccacatccggcttccttcagatttgcagtcacctgcaacacccttgccttcggctatatccttcccgctaccaggtggattcaggactttcacccgttagaaacgtgcgccgccaggcgcacgacaaaaaaagcccgccgcacaatcggaattcatctccttttgtgcagcggtcctcccgatgttgtccagcctgtccatcctctatttgaggcgcaccacatcttctccccatgtcgatgcttgccctggcttcctcaaatttgatgtcggtaaaacgataatacccattaccgatgatatgggccagcgtaccgttatccagtaacagtaaaggatccgcacccttaaaacgaaaaaagattacatgattctatcccataatcttctcttttcttaatattaaaaaatgtatgcgagcaggacgataagccgggttatgtcgttggatggccatctatctaggactgccgtcgccggcagcctcaagcaacctacccggaagctgacgggcagccatatgcttcctgttcggtcttgcttcgagtggggtttacatgtgccccgcctgttaccagacgggcggtagtctcttacactgcccttccacccttacctcccaggccgcagcctaaaaggcggtacatttctgttgcactgtccctggagtcgcctccgccagacgttatctggcaccctgccctgtgaagcccggactttcctctcccgcggccttgcggtatcgcggcagcggccacctgtcctactcacaacgtgtattagtctatcacagaatcgcgggtttgtccagagaaaccctggcgcttttccctgtattccgacggcggacagcctgtatatttcttaaaagcagtgctgaaatagggaatgttgctgtaaccggtcatcatggcaatctcataaatcttgcggttgggatcgcgcatcagctccttggccttttccatgcgcagctttaaaaggtaatctgtaaaggtcaccccggtctcactcttaaaggatgtgctgaacctggcgctgctgagtcccgcggcagcggccgtgtcctccagggacagggcaggactgctgtagttttcttccatataggcaagagccttcaccaccggcctggaatatgcgccggatttctggctgccggcatactcgcagatacgcttcaggttttcccccagcacgccgatggcctttccaatggtctcgcacccaatcagcttcttatattcctccaccggattctcaaacaccagttccgcgcatattcccgcgtctcccagctccttaaggaccgtgctgtaaaggctgctgaccataaactgcatatagatataggaatccatcccggcctgcttaagcagcgcctccagctctcccatgcgcttttccagaagcttgacattgccgcttttcaccggggtgataaggtcaatgtccagtatgggcgacgggtcgctttcctttccctcccccttgatatcctgaaaacgcagattctggttgtcgccttttatatattttaatttaagggcttcatgggcctcctggtaacactggtccagcagccggatgccccacagcacattgctctgcgcgcaggtcaggctctgcccctgttctgagaacagctgcctggtatggcttacaaagaggcttgcccgcatttccaccgtcatcctggtgggagaaatgaccgcaatctcacagcgattctccctctgcatcagcacataggccccctgttccctcatatggccggcggccgctgccatgaggcggccgctgtccggggattcaaagataaggaccatacagtggtcatgctccatctcctttaacgggccgctgtcgctcacctcgtacatcagaagcttgcgcagcaaatcctctctgtcctcaaaggagtcttttctggcctcgtcgaaccgcttgacgcagtccgaagccaaatgggtcagctcatccatgttaatgggtttggtcagatagtcctgaactcccagtttaagggcccttctggcatattcaaaatcatcataaccgctgaacacaatggccatgagttccggattctgctttttcccctcctctatgagctgcagtccgtctacatgaggcatacgtatgtctgtcatgagaagttccggtctctgttcctttaagagcgccagaccttcctttccgtttccggctgttcccaccagttctatccccagggacgcccagtcgataacgctgcgcagcccccgtaaaataatttcatcgtcatcacagataatcgctctcatcggatgtctcccccttttttccaatccgcagggtcaccacggttccctctcccatagcggactctatggtcaccccatacctcctgccatatacaattttaatcttgtcgttcacattgcgcaccccataaccagtgccctgctgatccgaggatatggtatccagttcccggttcaggcggctgcatgcgtccttatccatccccatacctgtatcctgtacctgcagaaggacatcccctccctgcggaaagatatggatataaatataccccttctcctccatgggcttgattccgtgatagatggcattctccaccgctggctgtaatatgagttttggggtcctgcatgacaaaatggccggatccacattgatgtcatagtcaaatttctcctgataacgccggtgctggatgctcagatagctttttatgtgctttacctcttcctctatggtaatgatatcccgtcccttgctgagacttatcttgaaaaagtctgtcagagcggtcagcatctcaatgctctcctccacctgccgcatcctcagagaccagatgatggagtccagggtattgtacaggaaatggggattaatctgggcctgcagggcttttaactcctctctgcgaagcttctcctgttcccggtaaatggtgtcaatgaggttcctcatctctcctgtcatatgattaaaggaatcatacagcacccctatttcatccctgcgctccgttttaaccgatgtttccagattgccggcacacacctgttccattgactttaccagggtgaacaagggcctggtaacggactcagccactatttcggacagtatcatggatatgaccactgccagcgccaggagcattatcatgagcaccttgatatattccgcggagcgggtaatggatgcttttggtatgacgcccacgattttccagtccgtctggttcagggtctggtagaccaccagctgtcctttgtccttcagcacatgggagacgccgtattccggtatttcacttaggttttcctccaccgtgcggcgcgccttctcgactccatccctgtccttccacggtccttcccccgctgtcagattcatgatccggttccgttcatccatcagaaacacatctcctgcgccgctgaccgccctggccgcgatgccggacagcttgtcggaatcaatatccgccagaaccaccccctttgtccggcccgttgccttatcaataaaagggattcccatggacacataggaggtatagggggtgctgaccacataggagttctcgtggggcggaaaccactgggcctgtcccgtggcatggatgatccgataccagtccgtgtccctgggatccgacaccaggaaggaggaggaattgctcttatagcgccccccattatcccccagcacatatacgccaaagatatcccggttataggaaggaagcaccatcatctccatgctcccctccaggtcataggaatacatctcctttatggaccggaactggcgtcttatgagcttctgcatgctgatattatcattcatggcagaacatacctgaaacgtctggagaaacagttcattgatatcctggcatgcattgcccaccatctggaccgtggtggcctccgcctccttaaggatccgggacgcggtcatataatagtggagaacgccggtcaacacgacaataccggttgatgtggcggcaaatgaaagaatcatcttctccttcagcataagacgggctcccaggtcccggcatgccctgaagcctgtccatttattcatataaacctttatggtttccctaatatgcatcctcaaacaattcctccgcgttatccatggtatattcccggtgcctcaccatggtctgccggtccggtttttcgcccctctggtgcctgtttatgatgtcaaataccacatctccgtattccggactgctctttaccgtggccaggtattcccgggcaatgatggccttaaacacatcctgtattccgcctatggacacaatgaccacatccttgcctgtttccattcccgccagcttaagggcttggagaactcccagcccgtcctcgtcgctctgggcaaataccgcgttaaaaacaacgtcctggtccgcgatcacggactcggtcaccttctgggccgtgagccggttcccactgctctccacacgcttggatacgtataggttggagtgctcccttacaccgtgcataaatcccatataccgttcccaatccatggccgaggacttttccccctgaataaccatggtatggcagggctcaataccgaaatgacgggccaggatatccgcgcaaagctctccctccgcgtaatagtccgaagcaacatagcccagtatgtagtcttcccggtcatactccggctccatctccacatcctgttctgccagtatcaccggcactcccctctgcctggcctccagcagtacctggtcatagccgtttctggctccgggaatcaggataagataatcaatatccgaatccagaagtccatatatatcctcaatctgccactccaggctctcctcctccggcgcatggtaaatcagctgcgcccctctcctcctggccgcctccttaaagctcttaatctgagctgttttccagggcgtcagaggttctgcctgggataaccccactctcagtccctcatgctctgtattctgtgccgccggaagggaccacctgtcctttaccagccataaaaggcatgcaagcatcaccgcaaggcatgccgcaatgattttctttctcatataccaatgcccctgtctcatttgaatccaattataccagaaaagcgcgccaatagacagaaaagataatataagcgggaaaaacccaaggctgccggggaataaacccttcggcagccttccttgcccatattctcttattttaatagaacaggtttaccagtcctgtggagaacaccggcacataggccatcagcatcatgcagataaacagcatgacatagaacggaatggattccttgatgaactcctttattttacacttggtaatgccgcaggtgacaaatatcagcgctcccatgggaggcgtcacgccgccgcaggccattgtgaatatatagaccatagcaaaatggatggggtcgatgccgtatgcctcggccaccggggccaaaaggggaaccagcacgataagggccgcatttccctcaataaacatgcccaccacgatgagaaacaggatgatgacaaagaggaacaggtatttattgtggatggttcccagcaccagcgccgtaaactgctggggaatctgctccctggtcagaatccaggcaaaggcagaagcgccgcccacaatcagcataatagacgccgtggtagccacggtctccttaaggcctgtgccgatgtccttaagcttcagctccttgtacacaacgcccagcaccagggaatagacaatggccaccgcccctgcctccgtcggagtaaaaattcccaaacggataccgccgatgatgatgacgggaaggcacagaggaaggatagcgctggcaatctcaggagctgcctgtttcatggtcagacgatctgtgcgcatgggcatatatcctctttttttggagataaagtgcaccagtatcatcatggcaacacacaggagcaggcccggaccgatacctgctatgaacagcttaccgattgaaatattggcaatggaaccatagagaatcatggcaatccccggaggtatcaagggtgtaatcatggatgacatagctgtcaccacagtagagaactgcttggaatagccgtggcgctccatctccggcaccagcatcttcgcctccatggcagcgtctgccagattgcttcccgacagaccgcccatcagcgtggacaaaagtacatttacctgggccagtcctccggtcatacgcccggtcatcacattgcagaagcccatgacacgcttggttacgccggaataattcataaacacgcctgcacagataaaaaacggaatagccagaagcggaatgctctctacgcctgccagaactctctggcccaatatctttgtgaaaggaccccctgtcaggaaaaaatatgccatggaaccggaaagaatggagatgaacaccggaaccttcaggaacagcagcaccagcagcactacagtcgatattaaaataatacttgtctccattatttacatttcctccccttttcctgttaaatccctgtatgtattcagacatacctgcaccgccatggtcagacatcctatgggcagcggcgcgtagataaggctgtagggtatcttaaggatgtttgtcacacggtcatagcggaccatctgcatgatataccggactccctgatagcctacatagcagaggatgatgactgccgccgccgcaataagcacgctcagtaatttctgaagcgtttccggaaacatttcaacaatcacatcaatagccgcatggttcccgcatacaaatgcatacctgcctcccagaaataccacccaaataataagagccagctgcacttcctcctgccatacaaatggatctcccagacaatagcgcatgatgaccccaaagaacgtaactcctaccagaagtatcagggccccacaggctgccagcacgtccgcgttgcggagcagattcccaatcttgttatctgatttcataaatatttacccctttcccggtacacttaatcctgcctgccgatgatggccttcatctcttcaatcaatccctcggaccacatggccttaatttgcgggtcctcataaaatgcctggcctgctgccttgaaatcctccggcgtcaattcacttactgttacgcccgcttcctttaaagcctccagcgcttcctcatccgccttttccagctgctggctgttgaatacaccggcctggtctccgcactccatcagaatattctgctgctgctctgtcagtgtatggaagtaatccgctcccataatccagcaggtcatatcatatgtatgggcatccagcaccagatttttggccacctcctggtatgcgccgtttaaaatgaccggaagagggttctcggccccgtctatggttccctgctgcagcgccgtgtagatatcgctcatagccataggcgtgggcgttgctcccagggactcaaacactttgatcagtatggtctgattcggaacgcggattttcctgccctttaaatcactgaccgcattcaccggtttttttgtgatggtatggcggattccgtatctccatgtggtcaatatcttcaatcccacattctgttccagttcctctgccttgccgtcaaaccagtcactattcaccaccttgtccaggtcctcccatccctcaaacagatatggggcaaagagaacgccaaagtcctggattcccctgtcctggaaaaacggaccgttggccagagtgaccacgcagtccccgttcacagcctggtcaatgatattgtccttgcttcccagctggctggaaggatacagttccactctcatggtccccccgctccgttcctccaccagtctcttccactcacggcaggccaggtcaatgggttcccccggattgttctcatagccaatcatgatacggactttcttgccgctgttctctgctgtctgaccgctgtccctctggctgccgcagcctgccagggatacggccagtgtgcagcttaccagtaatgccagtatcttcttcatttcttcccctcctgaatttttattcccgtggcacagccaccggattcatgtttcctcgtctttaatacccttattatatcgttggggcaggtgttttgtacattcactctcattcctttttcttttaaaatttttcccccgcagaataaaaataaaatagacgaatcaaaatacgcaaaaaaagaccgtttcctgtaccgtgattgtaaggaaacggtctgtctcatctctgtgccctctctgcgggcatcacacgttcaggcagctcccgccgatgaactccctgagaatggaattcttgggaatatcctcgctgctgacgccgataaaataatccaggaacttaaggagccgcttagcctccagccactcctcgctgtcccttggaatggcgaagagcagaggctgggcgtactgcttcagcacggccagctcatagacaagggcggaattgaacatggcgtccgcctcctcctggaaggggaagatgttctcctcctcgcccctgcgcacagaaggccacatgcggatagtctcccgggccgaggagcctcttgtcctggcatcccgcaccattcttctcagaagccgcccgtccgtggtgggaatgcggttatgctcatcgatgttgagctgtgtcagggcgctgatgtaaattttaaatttgctgtctgccggaagggtgtaggaaagcctgtcgttcaggcaatggattccctctatgaccagtatgtctccctcccccagctgaaggaaattccccttatactccctgaccccctttttaaagttatagtagggaagctccacccgctttccctccaaaaggccggtcatatcccggttaaacagctccacatccagacattccagaatctcatagttgtaattgccgtgttcatccctggggctgtccacacggttcacaaaataattgtccaccgcaatgggatggggctttaagccgatggcctccagctggactgacagacgatgggaaaatgtggtcttgccggatgaggacggtcccgcaatcatgacaaagcgggcgttcttcctggctgctatctgcgctgcaatctctgcaatcttcttctcctgaagggcttcctgtatcaaaatcaggtgggacatgtccccctttgcaatcctgtcattcagggcgcctactgtctccagatccatccgcctgccccactccgtggattcagacagggtggcgaacagcttatcgctgggcgcgaacttgtgaaggatgtccggcgtattcctgtcaggcatcaccatcacaaacccgtagtggtaaggaatcaggtcaaaatgcttgatgtagcctgtattctgcaccatgtacccgtaatagtagtcctcaaacccgtcaatgctgtagatattgaccctggataccatgcggtaccggaacagcctggccttgtcatacatccccagcttctcaaagagctcgatggcatcgtccgtggacacgctgcgcttcataatgggaatcttccgctccacgtactccctcatcttagcctttaccgcgtccaggaattcctggtccaggacaaaattccccctggcttccacaaagaatccccgtccgatggaaaaatcaatcatcagcttttccacattgccaggtcccgccacgctgtagaatgccttcagcatcataagagacgcgcttctctggtaggcggacattcccggcttatcctttgcggtgacaaaggacagctcgcagtcctttacctgtttatgcagctcctggagctttccgtttacccgtaccagcaggatgtcatattcataccccttctggtgctcccggactacctccatccacgtggtcccctccgggtattcctttgtgatgccgtgtatcttaacctgtgccattccacttacctccctcattttcaagaatccggttctcctgtcacacaatcacggcgggccactgaggcggcgcctgctccagttcaacccggcttcccagattcttcctgagaaactcagccatatacgggataaaaatacgctccagcccatagtggcctccgtcgataatggccatgttcctggccgccgcgtctatcccctgatggtggctgatgtcccctgtcacaaggacctgggctccccaggccagcgccccctcaatttcgcttccccccgcaccggggcatacggatatacgtgaaaccttctgttccataagctcatccccgtatacaagggcaaagggaaggccgaacacatcctttacatgggccgccagctcccttacggtcacttcctcctttaagactccgctcttgccgatgccgtaggaaacagcgccctccgggccatccatctcccccagcgcctccagaggaacgcagtcagacaggcccagccgttttgcggccaaatcagccatacagccgggagcggcatcaaagttggtatgcatggcataataggaaatatcttcctgtatcagcttcaccagccttctggtgataaagttctggtcatttaccttcttgatggccttgaatatcaggggatgatgggtcaaaagcatatccgcccctgaagccgcagcagcctccaccaccttgtccgtggcatccagggcaatgtatatctttcttacttccttatcgcttctgcctgccagaaggccgggattatcccagtcacaggcgcagtcttccggcgccagtttcctgcatacttccatgatttcactgcatttcatcttgtgcctccttaatccaggacagttccttctgcctgcttattctggcctccgccctggtctctgtgtcggtaatcccctctttttcctgaagggattccaggattttctctattctgagcgtctccctgtccagatattcccttaaggtaatgtccttcttaccaatcaggagccttccgtagagataatgggcctggctttcatattccataaagccccttttcacgctcatcaccgtataatactttccctcgtcctttaccatggcttcgtcctcaatggcaaaaccatgtccggccagataacgccttaccttatccaaatccgactggggcgaaaggatatactgttttacgctgtcccacacatgacggccctcgtccaggatttttatgatcagctccccgcccatgcctgctatgatgaccgtgtcggcctcgccgggcttaagctccttcaggccgtcgctgagccttgtcttgatgggaaccgccggaaaatcctgtctgcgggccctctcccacgcctggtattcccttacatgggcctgggccctctccaggggaccgtatcttacgtccatggccagggcagaggaaatccgtcctgtctgagccaggtacacaggtatatagccgtggtccgtacccacatcggcaatgcggcttccctgtctcacaaacccggctacggtcaaaagacgggccgacagctttacggttcccgcctgttctcttttatctcttgtctctaacttgtcactattcatccagataatcctttaactttttacttctgctgggatggcgcagcttgcgcagggcctttgcctcaatctggcgtatcctctccctcgtcacattaaactgctttcccacttcctccagggtcctgggacgtccgtcgtccaggccgaaccgaaggcgcagcaccttctgttcccgctctgtcagtgtcagcagaacttccatcagctgttcatggagaagggtgaaggctgccgcgtcctgaggcaccagcacattgtcatcctgtataaagtctcccaggtggctgtcctcctcctcgccgatgggcgtctctaaggacaccggctcctgggacatcttcatgatttcagatacccgctccaccggcaggtccagcctggccgcaatctcctctgtggtgggctcccttcccagctcctgcagaagctggcgggaggtgcgcaccaggcggttgatggtttccaccatatgaaccggaatccgtatggttctggcctggtccgcaatagccctggtaatggcctggcggatccaccatgtggcataggtgctgaacttataccccttggtataatcaaatttctccactgccttgataagccccaggtttccttcctgaatcaggtctaaaaactgcattcccctgcccacataccgctttgcaatgctgaccaccaggcgcaggttggactctgccaggcgtttcctggcttccgggtcgccgagctccatcttcttggccagctccacctcatcctccatgcccaggagaggaatcttcccaatctccttcagatacatgcgcacaggatcctccaggctgacgccctcgggaaccgacaggtccaggtgctccatatctatttcttcctcttcatccagttccatttcctcctcgataaaaaggtccgggtccagctcatcctctgtccccatgcggatgacgtccaccttattctggtccaggaactcaaacagcctgtccaactggttggcggcagggggctcctgaccaaaataattcatgacctcctggtattccaatacatttttctttttcttggcttcctccagaagtcctgccagtttctcctcaaacacgtccgtcccttccataatttggtccatccttcctatgaaatgctgtcaatccagggagatgtgcagctgctttaaggctgcctgctgcctgataatctcctgtaactgggttatatcctttgcattgcggctggccacatccaggctgttctttctgaccttcatcacagtctccgaaaatgccttcttttgttcttcattgttcagggattcctttaaactggcgttaaacagggccgccacctccttgtactggtcctcatcgttaatgaaccggctgagtatggccgcggggtttaaatttccctccctgtgtccgtcaaataccaactgtgccacctgatggtacaaatcctccacaaaatcatctgccgttatgacgccctctatcttctcaaacagggccggggtctctataagccaggtaagaagcagtctctgggaacggcggattccatcctccttatccggccgcctgggtttgcggctgccgccagatccgcttctggggaatacctcctcctctgcctcctggggaaccacccggccggaatggctcaggctttcacctgccttaagccccatggacatgcccatacggttgaccagacctctcagctcgtccgccggaatcatctgctccctggccactgcctggagataattttcccgctccagggcctcgccaaactggagaagctttctcgctgtctcctggtagaacctggtcttctgctccggatcatccatctcatacccccgccgcagtacatccacctcaaagagaaagctgtttttggcctccttaatccgctggcggaatgcctctgcccccatgttcttgatgaactcgtccgggtccttatagggtttcatgttcagtaccttaatggacatccccacttcctttaaaataggaatggccctcaacgccgccttcaccccggctccgtcgctgtcataggtaaggattacctggtccgtgtaccgtttcagcacattggcgtgctggctggtaaaggcagtgcccagggatgccaccgcgttggtaaaccctgcctggtgcagggatatgacgtccaggtacccttcacaaatcagtagatatccttccctggaaagcctggcataattcaggccgtagagattgcggctcttgtcaaagagttttgtctccggggaattcaggtatttgggttccccatcccccatgacacggcctccaaatccaatgacgcggttgttcacatccataatgggaaacatgacgcggttccagaacttgtcccttccgccccgttcctccagcgtcaccaggccggtatccttaaggaaactgtcctcgtaaccctttcccttcaggtagcggtacagatcatcgctggtcttattggaatagcccaggccgaaatggacgatggtctcatccgccagtcccctcttaaggtggaaataatcataggccggctttccctggggctgtttcatctggtaatagaaataattcgccgccagcttgttcacttccagaagcctggccctcagctccgcctgctctctggcctcgcggccgtactccatcttcggcaggttcactccggccctgtctgccagggacgaaagcgcctcctggaaggtataattttcatattccatcagaaaggtgatgacatttccccctgccccgcagccaaagcagtaatacatctgctttcccggcgatacggaaaaggacggggatttctcattgtggaaagggcacaggccgaaatagttagccccctttttctgcagtttcacatatcctgaaatcacgtccacgatgtcattcttcattctcacttcttctatgacttcatcgggatagtacatgcaataatctcccttctgtatcttttaatgccggctgtccgaacacagccggattgtcagtacacgttccaccgctttggaacgaataattcctcaaactggtcaatggcatagatatcgctcataccggcaatgtagtcgcacaccacccgggacttcttctcccccttgttgaccatgagaagcacatactccaccggcagcttatccacatgtcccatataatactcatagagctgggtaatcatgttctgggcctttccctcctccgccttgggtatatcgttcttgtatacattgtcaaacatccatttgcgcaaaccctgcatggcctcctccatcccctccgacatggttatggcaggtttgtccatgctgttcagtatgatgtcgtgaatcatgttgttgagacgttcccggacactgtggcccagcacatcggtatacaccctgggcagctcgtgctccgtgaacatcctggcccggatggcgtcgtctatgtcgtgattaatataggcaatcttatccgacagccggacaatggcgccctccagggtggacggatggccggaggtcctgtggttgcgtatgccgtcccgcacctcccaggtcaggttcagtcctctcccgtccttttccagcacctccacaatacggacactctgctcatagtgggtgaagccgtcctcgcatatcttattcagtatgtattcgccggaatggccgaagggcgtgtgccccagatcatggcccagggcaatggcctctgtcaggctctcattgagccgcagagttttggctatggtacgggctatctgggacacctccagggtgtgggtgagcctggtcctgtaatggtccccttcgggagccagaaacacctgtgtcttatgcttcagccgtctaaatgccttggagtgcaggatgcggtccctgtcccgctggtactcaggccgcatatcgcacagctgctccggcttgtcccgtcccctggtcctgctgctaagggacgcataggggctcatgtacgattcttccaatgcttccagtgactccctgatattcatccatccactccctatctctattattatattgccggattcctgtttttactacaaaaatttcaaatattgcgtaagcaaaagagcatcagaccggtaaacagctgcctaatgctcacattatatcataaattctaactatttcctagaggatgtgacgcaggtcatgtaagccgggtatctaagctggtcttataaacatccctacaccggcagactgtccctcacacaaagagtcccataccccagcctctcattgggccacacatcataccccggcaggtgcctggcccctctggtaaaatacgcctttaccttctccccgtaaaggaaggggtcgtttccctgcaaaattccccactgcatcagcagggccgcgctgcccgtgacaaagggggctgcaaaggaggttcccgtcactgcctcgtatccgcctccccgcctggctgtgacaatatccactcccggagctgccagatccggttttacctgctgcgtctggcgggtgaaaccgcggccggaaaaatccgcgtaggcgcggtaagaatcatcgtaagcccccacggatatcacattggcagcagtggagggaatggtcagggtggtctccggcaccggccttaaaaagcgggtggacgggtttaaaatccccctggaaggcagccacatatcgtagcgcccggtcacaatccgctccggcgtcaggcggaaggtccagattccgctgtccagataatccctcacaggcaggaaatcaaagtatacctcctgggcccggctgaagggactgggcttgccgtaataaatcaggatccgcgttcccccgtagcgcagggtctgggggcccagccggctgtcgataggcccgatgacctcccctgacggcgtgaccaggcggatggaaaactggtccacataggacttccacagctgcactcccattcccgtctcatagggcgcgatggacagctgcgcattttcctcctgtcccatgaccagacttcctgccctgtgtcctgccccggttccctcgtttcctgtgccggccacgataacgtttctgccaatgttcgacatgtcgttgatgaaggtctccagcagactggtcccgtcatgggatccataggtatttccaaagcttatgttcacagccaggggccggttcatatcccgggcccgccggaccaccaggtccagagccttcattaactgggtggtccgcggaaagctgtccgtcaggggcgttcccagtttcaccaccatgagctcgctctcataggccacgccccggtaaacaccgtttccctccctgccgtttccggccgcaatggctgccaccgctgtcccgtggccgctggggtctgtggaaggcaccagctccagggcagatgaccggctccctgtttccagggcagcgttgatctcctccctggtataaatccggtccctgtcctggtccgccagcagcccgatgcgggtggttccgtccgggttcctgaaatccggatgaaagtaatcaatgcctgaatcaatgactgccaccagcacgcctcttcccgtgagaccggattccaggccgcttataacgcctgctcccgctcccacgcctcctgttcctgacccgctgctggtctgaatcgtgcttagacaggaggctgcccttgccatgttgctggcaaagaacagcctctttggtttctcgatgtatacaatttgctccatggcgctgacctgatctatccggctctccggcaccaccaggaccgcgtatccggcagccagctcatccacccggataccctcgttccgaagggcctcaagtgagccattgtacctgactatgagctcccatgtcttctcctcagggtcataccccacattcaggttcactgatttcagccgttcctcctccgtggcatccagggccaggttcagcagattttcccgtttctgattttccatatgggcgcacctcctctacctatatgtgtattcctatccccacacaatagaataaataccggcaaatcccgtcaaggtcacagacgcaaccagaatcggggtgagaaaacgaatgcagaatatccacagcttcttaagcttgaaggtgaccccgtttttctccacctcgtccaccagatactggggttcccatttccagccgataaaatagcacatggccaggccgccaaagggaaggaggatgttgtccgtcaccattcccacaaagtcgaatacactgtaattgagtatggtcacattccccagagtgccgaaggacagagcgctgggaacccctgtcaggaaaataaggaggcccaggatgaccgtagcctttttccttgtccacttaaggctgtccactgcaaaggaaaccaccacctccagcagggcaatggcgctggtcacggcagcaaacagcaccagtgcaaagaacaggattgcaaagaccgaccctcctttaatggaggcaaacaccttgggaagggtgccgaatataaggcccggcccctgtcccggctccagcccaaaggaaaacaccgccggaaagatggctatacctgccatcaatgcaatgatggtgtccagtcccgccacgctggcgcagctttttggaatattttccttatctcccagatagcttccgtaggtaatggtaattcccatacagaggctcagggaataaaatacctgacccagggccgcgctgaccgccttcatgttaaaggccgcgctgctgggaataaaaatgaatttgaggcccaggacagcgtcaggcagggtcacgcttctcacaataattacaatcagcagcacaaacagcaggggcatcatgattctgctgacattctcgataccgctgatgccgtgatagcagacagcggttgtcatgaagaggaagaggaaatgccagaacacaggctccgccggcgcgctgataaatgcctcaaaatcctccggagcgtggaaggtggttccatagcttacaatatacttgatgatccagcctccgatgacactgtagtaggacagaatcagaaatgccgccgccactccaaacacccctgcaatcctggcattggggtggatatccccgtatgccagcacgggatcgtggcgggtctttctgcccagtgacatctccagcatcatcaccggtacgcccagaatgcagataaagaataaatataccgccaggaaggatgctcctccgtttcgtcccatgagatagggaaacttccacagatttcccagtcctatggccgcccctgcggttgccatgataaatccaagtttacttgcccattgattcttagtcttcataccagtacctttccatgtctttttttaatgaatatgaatatcagcccgctgactcccatgaggatgggataaaagcagtagggaatgatttcaaagggagtcaggcctgtcaggccggccgcggccagaagctgggcgccgtaaggaatcagtccctgtcccatggagctgaacatgtccaggagggacgcggaacgcctgggcgtcacgccgaagtcagcgctgatttcttttgcaatggggccagccatgacaatggccaccgtattattggccgtacacatgtccaccagaagagccagggctgcgattcccagctctcctcccctttccccgttgattctttttttgatgaaggaaagaatgaaggcaatccctccgtactcctttaccagggccacgatgcaggccacgatcacggatatcaccgtgatatcatacattcccgtgattccctctcccacatgggtgaacatttcccccaccccgaaggcgcctgtagccactccggctatcaggctcagcaccgtgccggtcatgaggaccagaaatacgttcactcctgccagggcgcctgccagcaccaccaaatagggcatcacccgtaacaggctgtagtcaaggctgccctgtatctggaacgaggcatcctttcccaggaccaggaacaaaaggatcgtgacaatggctgccggcagcacgatgagaaaattctccctgaacttgtccttcatctcacatccctgtgtctttaccgctgctatggtggtgtcggatatcatggacaggttgtctccgaacatggccccgcccaccacggcgcctgcgcagaccgccatggaaaatccggttttctggctgattcccaccgcaatgggagccagggctgtgatggtgcccaccgaggttcccatggatatggatatgaagcacccaatgagaaacagtcctgccacagccacgttggagggcaggatggaaagtcccagattaactgtggagtccacaccgccggccgccttcacagctcctgtaaaggcgcctgctgccaggaatatgaggcacatggtgatgatattttcatcccctacgccctgtgcggccagctttatcttttccgaaaagccaagctcccggttctgcacaagggccgccagaagcgcaatcaaaaaggccacaatggccggcatactgtaaaagtctccggtaatgaacccggagcccaagaaaatcaacagaaatatcagaataggcagaagggccgctgcccttccctcacgatcttcccccatgtttttgtccccctgtatcatatgctgcgtaccgcccgtatcatatacaccggtacatacgcaagctgcggcctgttgggccgcagcagctttatccatgttcaattgttctatatactattttaagaagccgttgacaatctgggcttccgcctcttcctctgtaagacccagggtcataagcttcacaatctgctcccccgcaatcttgcctatggctgcctcgtgaatcagggccgcgtcaatgttgttggcaatcagtcccggaatggcaaaaatcttggcatcatccatgatgatggcgtcacactccgtatgtccgctgcacttggcgttgcccacgattttggaattgaaggtctgctttgaggtatccttggcaacggaacgtgacaccacatccgcgctggaatcctctccgttcagattcacgatgtaagtactctctgcattctggctgccgtgggtcaaaaggcgttcccgcactataagcttggctcccgcggcaagctcagcggagttggtcctgttggtggaatccacaccctcaatctggaccatctccatctccatgtagctgttttcctccatgtagacttccgtgcccggattcaggatgcgcttgccgttgccgtcaccctcgccgtaatgcttctccacatatttgacctttgcattctttcccacaaagaagcggtggattccgtcatgctctgaatcctggtccccgcagttatgaatgccgcagcctgccacgatgaccacatccgagtcctcaccgatgaagaaatcgttatagaccatctcctttaaaccgctggcgctgaccaccacggggatgtgtacgctttcgtttctggtgccgggtttgatgcggatgtcgattcccggcttatccgtctttgttacaatgtctatgttggccgtggtattgcggccggctgtctggccgttggcccttatattataggcccctgccggaacaccgtgaaggtcggccacttcctctaatattctctcctggatgctgtctgccatatcgctcactcctcccctcactgcgctgtctcgtaaaatttactgcaggcgtccaccgcggacgcagttcccatgatctgaggcatgatttcatccctggtgccctggttcaccaccttgccgtctgcaatcaccacaatctcatccgcaatatttagaatccgttcctgatgggatataatcaggatggaaccattggtgttctgtctcatgcgctcaaacacctgaatcaggttctggaaactccacagatcaatgcctgcctcaggctcgtcaaatacggaaagcttggaagccctggcaatgacagtggcaatctcgattctcttgagctcaccgccggacaggctggcgttgacctcacggttgatatagtccttggcgcagagccccacctcggccaggtattgacaggcttccgacaccgtcagcttcttcctggctgccagacggagcagatcgattacctgcacacccttaaagcggacaggctgctggagcgcaaagctgattcccaggttggccctgtccgtgatgctcatatctgttatatcctgcccgtcaaagaggacgcgtcctcctgtggggcgttcaattcccatgattagtttagccgtagtggacttgccgccgccgttagggcctgttatgaccacaaacttgccgtcgcccactgtaaagcttatatctttgatgatacctatttctcccttttcatcatttacgtcaaaggagagattctctaatgtaagcatgatgttccttcctctcttcttttctctcacacactgtactgcttattttaagccacaacttacagtatataccattttctactaaattactatcaaaactttacctcttatggtgggatttgtctgttgcaaatgcatcagaaacaaccggactgcaaaaaataccggaaacgcaaaaacaggaagccattcagcttcctgttccatgaaccagtgcagaagatgggagtcgaacccacaaggtattactaccacacggacctgaaccgtgcgcgtctgccaattccgccacttctgcgttacgctgctctcgcaagcaacgtaggttattataaaggatgatttatgatttgtcaatcatttttcggcaatatttttcaaaaaatacattcattggaagaggtcttgaaaaatagtggccctgacccgactcgcagcccattttccaaagcatctcaagctccccggcgggatgattcttccgtcctcatgctgccggcgcaccagtgcctctgcaccgatgagccccaaatcattcagtcccaccttgggctgaagataaaccttgaattccccgtgcttcaacgcgtactccatacggtttatgatttcattatcccggtagctgccgaagcgggcaatcaaatcgccttcccggcagggctgtggtgcagggcgccggttctgtttcaaggtattatcagccgtcttatgccctgagttcgatacccagcccgcttaatccgttgagtatcttattcatcacagacgtgacttccttttcctccagggtgtggtccttggcccggaaggtaatggaatatgccacggacttgtggcctgccagtacctgcgctccctcgtacacatcaaagagcttgtagctttccaggacctttcctcccctctgctcaatcacatcctcaatctgtcccaccaggatatccttcggcaccaccatactgatatccctggtcacagccgggaacctggctataccggtatacttgcggtcaaaggtggtgaactccataatggacggcatatcaatgacggcaatgtaagccctgtcgccaatcttatagttatcagccacatccgggtgcacctcgcccaggaagcctaccaccgtgccgtcatacagaatgtcggcctttcttccgggatgaaggtaaggatgctctgcaccggggtcataatgaggctttttatgcattccggccttttcaaagaactcttccaccacgcccttcatggtgaagaaatcgccgtccccgtacattcccagggtaaactgcatgcgctcgtcaggaagctctgtcagaggcagggacttgggacggtacacattggccagctcgtacaggcgcacattcttgttgcggcggttgtagttagtggacagtgaggtcagcataccgtttaaggatgtggtgcgcatgacgctgaaatcctctcccagtggattggatatctccactgttttcctcagggcgctgtcctcaggaatcagcatcctgtcaaataccctggggctctcaaaggaataggtcatgccctgggaaaatccgcagaactctgctatctccctggctacctcctctatctgaagcttgtaggaaagctttcctgtggtggcttcgccggagggcagtgtggtggggatcttgtcgtagccgtagaacctggccacctcctcagccaaatcagccatgcgctccaggtcctgacgccaggtaggcgcaatcacctcttttgtctcagggtcatagcccagttcaatggtctcaaagtaggaaagcatggtttcctccggtatttccgtgcctaaaagcctgttgattttgacagagtcaaagggaatccgcttgctggttctcttctcaggatagaggtcgatgatgccgcccacaacctctcccgcacccagctcctctatgagctggcaggcccggtttactgcttcctccgccgtattgggatccagccccttctcgtattttccggaagcatccgtgcgcagccccgcctttttggctgacagacggatattggtgccgttgaagcaggctgactcaaataccatggtccgtacattgtccgtgatttttgaattctctccgcccatgatgccggcgattcccacctccttttccccgtcattgatcatgaggatggtggaatccagctttctctcctgtccgtccagggtctggaacacatccccgtccttagcgcatttcaccacgatttcgtggcctgccagctggtcatagtcaaaggcgtgcatgggctgcccatactcttccatgacatagttggtgatatccacaatattattgatggggcggataccactggctgccaggcggcgctgcatccaccggggagaaggggcaagctttatattctttaccatcctggcgcagtaacggggacacagttcgctgttctccacccgcacattcaggtagtcgtggatgtcctcaccgttgcccgttggcgtgaccaccggtgcgtggaaggactttctaaaggtggccgcggcctctctggctatgccaatcacactgtagcagtcaacgcggttggatgtgatttcatactcgaacaccacgtcccgcagacccatgatttccactgcgtcggagccgggcacgctgtcccccggaaggatgtaaatgccgctctccggagcgtccgggtacatatccctgctggctcccagttcctccacggaacacatcatgccgcaggactccacgcctcttaacttgccctgcttaatcctgattccttcctcaggaaggtcgcctccgtcatggcctcctgccacgcggccgccgtccagcaccactggcaccttttcgcctatggatttctccgtgatattgggggcgcctgtgacaatctgcaccggctctccctctcccacgttaacctggcataccacaagtttatctgcatccggatggcccttaacctcaagaatctctccgacaacgattttttccaggttcttatccagacatgtataaccttctacctttgttcctgtgagcgtcatggcatccgtgtattcctgggccgtgacatccaaatcagggacatatgcttttatccatgataatgctgtgttcatgtgttctctctccttctatgctatgaatgtttatcagggcgcatgatcttagaactgtttcaggaaacggatgtcgttttcatacagcagacgcatgtcgtcaatttcatacttaagcagggcaatacgctccagtcccacgccaaatgcgaatccggaatacgcatccgggtcaataccgcacatctccagtacatgggggtgcaccatgccgcatcccagaatctctatccagcccgaccccttacagaaccggcagcccgaaccgccgcatttgaaacaggtcacatccacctcggcgctgggttccgtaaaggggaagtgatggggacggaactttacctttgtctcaggcccgaacagctctctggcgaattcggccagggttccctttaggtccgcaaaggtgatgttcttgtcgatcacaaggccctcaatctgatggaaggagggggaatgggtggcatccacctcgtcggaacggaacacgcggcccggcgcaatcatgcggatgggaagcttgccctgctccatggtacgcacctgtacaggcgacgtctggctgcgcagcaggatgttttcattgatgtagaaggtatcctgctcgtccctggccggatggcccttgggaatgttcagcttctcaaagttgtacctgtcgtactccacctcaggcccttccactacctcatatcccatgcccacgaaaatgcgctccacctcttccagggcaatggtgttaggatggctgtggcccacattgttcttcctggccggaagggtgacgtcgatgacctccctttttaactgctcctctctggcctttttggccagggcagtcctggcctcctccagccttccctcgataagacccctgacatcattgaccatctggcccacctttggccggtcctccggggcaacatccttcatgctctttaacaggttcgtcagttctcccttcttacccagataagatacacggatgtcattcagtttctccagcgcttcagaagattcaatctgcctcagcgcttcttctttgattttctctaactgctctttcatggcttctccttttctttgtaacaagatagaatcctgcttccgggatggtccgcctgcatcagactttctttaacgccccaatccccggaaagcattattgtttcacgggacccgcgttccaggaaagaaaaaagccccgtctcttcattgctgaagggacgagactgtaaactcgcggtaccaccctgcttcctgtatcatccccggacctgcacccggaatatacagacacttgatgcacgtaacgtgtgccagcgtcacagactaccggaatccttccacagattggtgaaagcatccttttgcctgtacggctccggtgggaatttcaaccgtctatctgaacccgggcaggctttcagccggcggcctcccctctctgatggaaaataaacgtctactatgcaccttcatcgcctttgaattatcaaacctaacctacattctagtcacattttctgaaaatgtcaagcggaaagccagaaaatcacatttgactttgaaaaaaagaaggggtaaagttatattcagggatcattttgtgctggtccttccaaaatcccatacaaaagaaaggcgtacccatatgattcatcgttatgaagctccctgcatggacctgcagcagattcaccagtccggccaatgtttccgcatggttcccctgccggaggatacatacccttcagaggccaagaacggttaccggcttatcagcggcctccgcgtcctgcgtgcatggcaggacggcacgtccatctgcctggactgtccccatgaggacctttccttctggctgtcctatctggatatggaccgggattaccaggctgtcattgactccattgaccgggaaaattcctatcttacggccgccgccatgagcggggcaggcatccgtatcctgcgccaggacccctgggagatgatcattaccttcgtgatctcccagcaaaagaccattccgaacatacgtcagctggtggaagccctcagcagccggtacggcactgtcctggaggacggacaagaccaggggaaagaagatgaccgggggaaagaaaaggaccctgtaaggtgccttccgccggcctgctcctttcctgcccccagccagctctgccttgcttccctggatgatttaatggggcttaagctgggataccgggccaagtacatccacaggctctgccaggacgcggtttccggcaggctggagctgtcccatctgagtgccctggactatgagggcgccatggaatatctcaccggattttacggaatcggaaaaaaggtagccaactgcgtatgccttttcggcctccaccacatagacgcgtttccagtggacacatggattgaaaaaattctgatggaacagtattttgacagaaaaaaataccgctgtatccccaaaaaccgtctctgcgaaacaatcgtagaggatgtgttcgggcgatacagcggctgtgccggcatcatgcagcaatacattttttattatgagcgcagcgtcaggcaaggaagggaatgagctgtgtcactccataagccgccccatggacggacgcaggcgtcctgccaccgtcactgccaggatgcagagtatatagtccggaatcatggtgggcaggcagtataccgcaaaaatggcgccccatcccactgtgtcgggagtcaccgccacaaagtgggtgatgaagtaaaagtaaaggattcccattccgtaataaatcacatagcccaccgtggcgctaaacaggcaggccccaggctttacagcgtgcatccactccactagctttcccatcacgtaggctgccagggcaaatcccagcagaaatccaaaggtggggcgtatcagataagaggggcctcctccccgcgcaaaaacagggattcccatcagtccgatcagaagataggtggacacgctgagaaaggcccttctggagcccagcaaaaggcctgccagaagcacaaaaaaccactggagggtgaaattcatggtgtccgcccccaccggtatgacaattttaataaaggctcccactgccgtcaatgccgtaaacagcccgcataccgtcaggtcttttgctattccgtgccgctgcaccattgtacggcttcctgtactgcttccctgtctcatctgttccactccttctgtctcatcaaaatctgccttccggacaaatcacatcatgcccagctcaaatatcttccatctctcccgcagcccggcttcccggcccaccgcaaaaactctggtgaactcgccgtccccccactgagaagccttctcaagggccttgggagaccatttctgggaaaaggaaacccggaccaccttatactccttatatccgtaggaggccgccagctggtcataatgggctttctgttcctcatattcctcctggggcagggtcttaaatttgtggacaatgtactcctgtatataatatccgtccttaaaatccctgtcctcctggtcaaagttcagggcttccagctgattttgggggaacagtctcctgcacatatcaaactgccccaggcccttatacttataaaaccaggcggctgtcatctgaggcatgtccgcgggcatggactcaaatttcacatgccttggaagcgcctcatcctgcaccgtatattcacttaccagtttttctccgccccttgccctgttggccgcagccacaccgaacatgatgaccaggcatagcagggtcaggccgcagattctgacagcctggggcgatatgttgcgtctgctcatataatgcgtcctttcatagccttttaacaccaggcctgggacatttccctgtgttccaggcagcatttgcgtattccctcggaggtattgaagaaccgtatcccatgggacctgatcttgtccgtattcatggtcagattcctgggacaggaggcaaagcgctcatcattgcatttcaatatgctgccggaatcgcttcctgccaattccctgaggaacagcctggccgtgtcaaaggtgttgtaccggttctcacttccaaagttataaacgcctccgggaagccccatggcttcttccagatggcgcaccacttcccacacataggtgattcccctgtaatcgtgaacagggaactccacctcccgcctttcctttaacgcgtctgtcagcttctgcaaaaggccctggccggctaccctgcccctggacggggcgtcatacaaccatgtaagcctgagggccaccgcatccggcaggtatgtgagcatggcttcctccgcccgtttcttatctcttccatacacatttcccggctttccctcgctgccctcacggttgggctccagggaatgggatgtgttgtaaatctggtctgaactggtaaatatcatgcggctgccggctttcctgcacgccttggccagattgacggttcccctgacattgactttctctgaaaggacaggattcctttcacatacacccgtatttgaaattgccgcgcagtgcaggacatagtcaggccggatggcctttacaaaggcggaaaccgccacaaaatcctcaatatccagttccctgtgtgtcacccccactgcctcatatccgtccctgccactaaaatattcacaaatccgggaaccgagaaatcccccggccccggttattaataagcgtctgttcattctgtttttatgcctttctacagatatgataacattatagcctactaattcttacatttctttacggatttcttaatattttaacaggctcttctttaatatgttatgtcctccagggaaatcatctcatatcccgtgctgtattcctcttccagaaggcttctgtccccatattccgcctcccccatctggttatcataggggtcgtttctcaaatgggtcatgggcggttcaaactcatatccgaactccctggctgccggaagacggaagggatccaggtttccgaagtagaaatcccatctctctgtgtccccctcccggtaggccgcacctccgaaggaacagtccgcgcaacgccatccatgggcgtttgtatagaactgtgcccagtcatggcagctgatttcaaagggcgatgtatagagtcccgcctgccatctggccggaatgccggtctcacggcacagggtgataaacaaaagcgcctgtacgccgcagtctcccttcatggacgaggccgcatactgcggaatgtcggtcagggtaaaatagctgcgcacaaaggaatacatcacatgggtggtgatatagtcatatattcttctggccttctttaagggatcctgttcctcccccacgatttcagccgccagttcccggatcaggggagtgaagcggatatggggctgctgctgcgccagccagacgtccgcgggctccgccaaaccatttgctccttgtttctctccgccgtgcttctcttcgctgtattccagaccgacatgggagaaatccaggtatgcttcccggttctcaaaggaaaactccaccgaatatttctgccccttcctgtgttttgtatgaaaacagatggtgcgctggaaggcatctgccctcgcaatggtatactcctgtttttcggcttccctttccccgattcttacgctgtggattttcacattctttatctgggcatattcaattggcaggggcaggtagaccttgatatcttcaccttcccgctccgcttcctcctggatcccaagtgtcccgcggatgcaaaacctgcatccggcgcctcccttttctttcatggaagcaatggttctgttaagcagcccgaagttttccgccttagaccggaccagttcccggtccagtgcccggttctcatattctttcctggtctttaagacatttttcaggaagctgctccggaagcgtacctctccatccacgtaaatccaatccgcggcatcctcctcccacagggtttcgagttcactgtccttaaaatcccttacattgtcccgcagcatatcaagggcctctgaccatgcataggggtattgtcccggcatgcgcttaagaatctccttttcaatcataagacgctttctcaaagcctgggaaatatcccctttcagcctgctgtcaatcctacggacagccctgtcaaaatcccctctccactttaacttttctatgtcctccggcagcggaaccgccagagtctcaaaataactgttgtccatttgaattttcctctccttatcatgaccattttccctgtcaccgcccaatctctatcataacccttttttgccttttgcacaaccgggaatagacgtaaaaaggcccggacaggctctgtgtgctgcctgtccgggctcatgctgtttcctatctatttaaaaatcccctttttcttaggcttctcttcctcctgggacgtgacgccgttcatggcatcgtcaaaccgccttaaggcttccttctgcgcctggttcatgcgttccggaacctgtaccaccagggtaacatagtgatctcccctgacactgcggctgcgcagcgagggaacacccttgccctttaagcgcaccttggtatctgtctgggtacccggtcttacatcgtactccacttcgccgtccacggtctttatgcggatggggcctcccagggctgcccgcgcaaaggaaatgggcaccgtggaataaatactggtatcctggcgcttgaatatgggatgctgggaaacaactgcctccaccagcaaatcaccgcgctcaccgccgcctgtgccgggttcaccgccccctgccagacgcacacactgaccattgtcaatgcctgcaggtatggataccttgaattttttgcggacggtcttatagcccgtgccgtagcagtcaggacacttttccttgattacctgtcctgtaccgttacagtcaggacaggtctgcacattctgtacggttccgaagaaggactgctgcgtgtacatgattttgccctttccgttacactttgaacaggtctggggggaggtgcctgccttagcgcccgtgccgtgacagctggcacagttttctttaaagttaatctctatctctttatcacagccaaatacagcttcctcaaatgtaatcctaacagaagtctttatgttggcgccccgcgagggaccgctcctggccctcccggacctgccgccgccaaaaatatcaccaaaaatatcgccgaagatatcacccatatccccaccgaagtcaaagccgccgaagccgccgccaaagccgcccccaccggctccgccctgttcaaacgcagcatggccgaactggtcgtactgctgacgtttctgagggtcgcttaacacgctgtatgcctcggaagcttctttgaacctggcctctgcctctttatcgcctggattggcatcggggtggtatttcttggcaagtttcctgtatgcttttttcaatgcatcctcatccgcatctttgggaacgcccagaacttcatagtaatctctcttactctctgccatgttgtttacctcttaatctatctgaacgccgcaaaactggccctgacaggcagtttcaaaagcactctttatcagccacaaagggggtagtggccggtttcccggctcctaagccccctgtttgttttatctggatttacttccttggatttatacttccttgaaatcagcgtccacaacgtcatcgccgcctgctgcatttccagcgccgcccatgtccgggcctgcctggcctgccgcgccggaggcctgcgcctgctcataaaccttcgcaaacagcttctgggcgctgttcatcagcttctctctgccggccttgatgtcctctacctgtgcgtctgtcatctcctcaaccggagcgcggttaatggcttccttcaatgaattaaggtcagcttccacctctgccttgtcgccaggagcaatcttgtctccaacctcttccagggccttctcggtctggaataccatagagtccgcatcgttccttgcatcgatggcttccttgcgcttcttgtcctgtgcctcgtattcagcagcttccttcactgccttatcgatatcatcgtctgacatgttggagccggaagtaatggtgatgtgctgctccttgcctgttcccaaatcctttgcggatacatttacgataccgttggcatcaatgtcaaaggtaacctcaatctgtggaataccccttcttgctggcggaattccatccagacggaactgtcccaatgtcttgttatcccttgcaaactgacgctcgccctgtaccacatggatatccactgccgtctggttgtctgctgcggttgagaaaatctggctcttcttggttggaatggtggtatttctctcaatcagtctggtagccacgccgcccatggtctcgatggacagggaaagaggtgttacatccagaagaaggatgtctcctgcgcctgcatcgccagccagcttgccgccctggatagcagcgccgatggcaacacactcatccgggttcagagacttgcttggctccttgcctgtcagctgttttaccttttcctgtgcagcgatcatacgtgtggaaccgcctaccagcaacaccttgcccagttcagaagcagtgatgcccgcatccttaagcgcgttctgtaccgggatggcggtgcgctctaccaggtcatgggtcagttcgtcaaacttagccctggtcaggttcatatccagatgctttggtccctcggccgttgcggtgatgaatggcaggttgatattggtggtggtagctgtggacagctccttctttgccttctcagctgcttccttcagtctctggagagccatcttgtcattggacaggtccacaccctcggccttcttgaactcggaaatcatccagtttgtaattgcattgtcaaaatcatcgccgcccagacgggtgtcgccgttggtggacagaacctcgattacgccgtcgccgatttcaataatggaaacatcaaaggtaccgccgcctaagtcgtataccatgattttctgctctttttcattgtcaagtccgtaagccagggctgccgccgtaggctcgttgatgatacgttttacatccaggcccgcaatcttgcctgcatccttggtagcctggcgctgcgcgtcgttaaagtaggccggaaccgtgatgactgcctctgttacagtctctcccagatagctctctgcgtctgctttcagcttctgcagaatcatagcggaaatctcctgtggagtgtacttctttccgtcgatgtctactctgtagtccgttcccatgtggcgcttgatggaagagatggttttatctgcgttggtaactgcctgacgctttgcgggctcgccaatcagcctctctcctgtctttgtgaatgctacaacggatggtgttgtccttacgccctccgcgttggcaataacagttggttttccgccttccataacagccacacagctgtttgtcgtacctaagtcaataccgataatcttgctcatagtcttttcctcctgattatttttagtggaatatatttctgttattgggtatgtcaatttgccacttttaccatactgtgtctgaccacgctgtccctgtacatgtaacccttctgcagttcctccgccactatgttctctcccaggctatcatcatccacatgcatcaccgcgttgtggtagttgggatcaaactcccggcctactgcctcaatggctttcacgccggcttcctccagtgttttccggaactgcttatatatcttctccatgccctccgcaagaggtgtttcctttgcatcctcaggcacagttgccaggcctctctcaaaattgtcgatgacgggaaggattctctctataatgtccttggctcccatctcatacatggcggacttttccttgtctgtccgcttgcggaaattctcaaattccgccatctgccgcttcacccggtcagtgagctcctctatcttttcatccctggggtcctttttcttcttaaagaatccttttttttcttccgtttcaccggcaggcgcctgctctgtgctctcctctgtttcctctgtttcctccggggtgctttcctgtgtctccgggatatcattagaagcttccgtctcctttgcctccccggtcccagaagcctggtcttttccccctgcctgctctgccttcagggcctcgtcttccttttttaactcttcgtctttcatatcttcactcacagcttatcacctttcatcttttttaaatgctgtatccagctgattcatcagattgcgcagggtcccaagaaccttttcataatccattcgcttgggtcctatgataccgatggttccccgcaggcctcctcccaaatcgtaattggcagtgaccacactgcagtccttcatggactgcaccgggctctcgtcaccgatataaacctgaatgcccgcttcttcctctgtaccggaattgacttccgccacaaattcctgcagcacttctttatgttccagtgtatcaatgagccggctggctttgtcgccgtccgaaagctcagggtacttgaatatgttggtggctccgctggtataaatctgcagatcctcttcccctgccttgatggcttccgccacctcgttcaggaccaggtccaccacctggctgtgatttcccgcatcgcccttcagcttgctgatgacatccagattgatttcctctatggtcagcccgttcaggctgctgttaagcaggatgttcagattaaggagctcctcgtcgctgagattatcctcaatatcaatcatggtgttcttgatgatattgccttccaccaccacaaccaccaaaagcttatgcttttccatcttggaaagctggatgaacttaagctttgtcttgtgataactggggccgctgatcatggtcgcgtagttggtattggcagccagcacctgggccatcttctttagaaccagttccagcttatcaaccttttggaccatcatctccttaaactcggttacctcgctctccttatccagcataatctggtccacatagaaccggtatcctttgtcggaaggaatccgccctgccgaggtatggggctgtatgatataccccatctcttccaggtctgacatctcattgcggatggtggcagagctgagcttaaggtctgaatatttggaaatggtcctggagcccaccggctctccggtttccagatatgtcttgatgatggcctttaatatagtgaccttcctgtcgtccaggagcgcatccaatggcatctgctcaccttcctttcttcaattattagcactcgacgttcgggagtgctaacatctacattccataatatattccttctggagtcatttgtcaagagataaatccaaattcttttcatattatttgcgttttcccttcacccgccggcacatcatgtgccatttccctttcatatcaactagataatggagttctccctccactttttacataaatattccaaattcgcagctttttctctccactttttatactcttgtaacacttgcttaattattttaacttgacaagtaacatttttgtaatataatgaagatacaactttataggacatataaaaccataacaatgtcataagattgcgaggtcgttgtatgcattactttaagaaaacccttctggccgcagccatggctgcattcagtctcacgctggcctttccggcatttgccgacgagcccgtgggaacggatgtgaccgtagtggaggccggtacatcagatacgtctgaggactcagtccaggatgtccaggagtctcaggaaacctccggttcccgggaatccaaagaccacagagcctctgttgttgatgaagaggaatatatatcccagggaccaggcgtccaaaaagaagagaaggaggaagctccggcccccagggagacatcccttggacggtttaccatcacaggatactgcggctgcgaacagtgctccggcggtcataaccttacctactccggcatggttcccaccccaaaccacaccatttccgctgatttaaattattttcctcttggaactaagctgaaaatcgacggaaccgtctacacggtggaggacaaaggttcttttgtaaatggtaatattctcgatatttattacggctcccaccaggaagccctggccaaaggtacatacactacagaggtattcttagtgcaggattgatttatgatgtgaggaataactaccaggcgtataagcctggtagttttttgcccttctccgggaaatggtttctggagcagaaatttttaccaaaatcctgtcattttcagacgaaaatggtgctatttccatatttttccttgacaaggtaaaaaaaatatgataaaaacttgtttattgctcatatattacaaaagtattacatattatttattaatgtgttaaaaatctttttctaattattacttgagcaataggaggtattacaccatgaaattaagacacttactgaccggagccatccttaccgtcagcctgcttgcggctactgccatcacagtccttgcagcagcgccaaagggaaggttcaaaacagtgaacagcaccaccatcagcggttgggcttacaacagcagcacacctgatgatgcgcttaacgtacggatatccatcaaagataagaatacaggtgaggaagttttctctcagagaatgacagccggggaatacagcgacgagctgtacggcagcggcaagggcaatggctgccacgcctttaccctcaatatggactggagcaccctgcccgatggcgtctatctggtagaaggctatgtgggagacagtgatttctccaaccccaggacctacaccaacggcaatcccgatgccagacaggaagcccctgctgccgaggcccagaacctgattccactgggcgtattcaagacaacggggtattgtccatgcggggcctgttcagagggctggggacgccacacctgcaccggcgccgtggccactgccggccacaccattgccgtggacccccgggtaattccctatggctccaaggtaatgataaacggcgtggtctacacagcggaggaccgcggcggagccgtcagaggcaatcacattgacatcttcttcaacacccatgccgagacacgtcagcacggcacccagaacgcagaggtctatctggtccagtcataaggcattcttttaaccaaaaacataatttacagaaatgaaaagaacaacccggtaagagtctttaaggctttttccgggttgttcttttcatttccaaaacacggtctagctctcactgcactcccgcagctccgtgccgtgatagaaaaagtctaagatctgcttgtaaccttttcctgtctttgccatgccctgagccccattctggctcatgcccactccgtggccgaagccgcctccatatatatggaaggaaacgcctccatcctcccccgtcctcttctcaatggcgataaaggcgctgggaagagtggcgtttccggtcatggtccccccgtccttcttggtgataatcagggacggatttcccagtgtagcgcgtatggaggactgtcctttgattgtaacggtaccgtcagtgcccgtgactgtaagctcgcctgctatgccccccggtcccctgtctgttatggtcatatcctgtatctggcccgctccgcttatctgggcggaagccacgtcggccggaaggtctgtctgccagcggaacatgggataagaggtgtcataggcaatcacatcctccctcttaatataggattcaaagccatcgttatcttcctttcccaggctctttcctccctcttttacctccgcggccctcagatagggatattttccgctgtcagtaccccaaacgccggcatccgccgtacggccgcaggaggtggagaaataaaacgcctcaatgggtttatcctcgtaaaacagcatctttccgtaagtctcctttacggcctgggtggatttatcatcggcagaggtattattatagacctggaaattcgtgctgtcatccacatgggcgccatactggctgtaagtattgccctggatctgccggtaggcataggtcctggcacacacggcctgggccttcagggcctccttttcataggatgggggcatctcgctgggcactacctttgtcaggtaatcctccaaatacaaatcattgaccagaaccagcccttccggcattcccttgatttccagactcccgctgtaaaccggcgtgccctggctccgctcaatggaacggatggtgattgcctccggttcatccggcgtgatgatcatgcgtccaaactccagataggggctgtcaggaccaaccgtaagctgcgtacctgcctccaggcgctctcccaccatctttcccttggcattctcatattccaaatcagcgccgcttcccaacaccaggtccgcggacgcatggaacacactcttaaagcccgtgtccatcaaaaggacgcggatggtcttggcgtcaaattccctctccaaaagtgctgcgcacaattttccgtctgccgccacaaattcctgaaggttatagcccaccagtatgtccgacgccttcagcaccttaaaatccccatataccttatatacatggaaattaggagccaggggaatctccccgtagccttctatctcaatggcatcctctgttacggacagcaccttgccgcttaaccggtcccgtttcatagtaattttgaccagcttgccgtcctccatgtgaaggtcagccagattcccggccattccgtcttccccgccaagtttggcgctcaccggaaactcccggtaggccgtacccagatacgccttaaaatgtctgccgtcactttcagccagccagacattctcatagaccacatttctggacacgagactggaagttatcatctccccgcccctggccagaaaccgtatctcacagtccaggaacgcgtccagagcaagtccctgaaacccgaagttgccggctgtggtataggcagtccagctctcggcctgttcaagattggacggggtgccgtagagcacggcctccgtctcctccactttcccctccgggtctgtctccctcaatatggaatcgtacagtttccaccagtccacctccggaaacgcctggtctctgttttttctggtggaaccggtctgaagcttcagcttgccggacacctgggcggccatgtacgaagcctctgcgtatgtaagatatccctgggcagcggccagggaagcaggcgtaagctccgggtccagatagccctcatcatagagataatccatatatttgacaaaccagttgtccttttcctttgcagaaaaatgggaggtttcccgttcctctgccctcttttcacactcttccttgtctgtaagggccagagccatggccttcattgcctgggcccttatgattccgtccctgggcggctccatctttacgattatcaccataagtgtgaccaccaccagtatcacgccgcttacccatgctatcatcctgttcttcatattcggtccaactcctgtaaacgaagtaaagcagcggggtaaccgctgcttttatcatgtgtaaccccagaatgccgtctcttacttattgacgcctagcaatgctaggtgggcaacctcacttaaacatctgccttccactcgacggaggcctgacatccgcttaaaaatattggaatcccttttgtctaatgtaggttcaaaattggtaagagtatcgaacaccccaggaaattacaattccacttcttttatctggtgttattataccccaaacacttgggtttttcaagttgatttttctgaacatttatggaattttttcctcgatggtccctctttccacacctgcgtcagaaacccttgcaaatataaggggctccggttccggtttctgttttcccagggtacaggaggccaggaatttttccgctgccggtccaaacagttcctcatgagaggcgtaaaggactgccatggtctctcctgcttccacacggtccccatactttttccgcagaaggatgcctgcgctgtaatcaatggtatcctccttcttattcctgccggctcccagcatcacggatgccactccgattccctctgtatccatatgagtgatacagcctgcctcaggagcctttacctcccggctcaggggcgccttcgcaaaaagatccggatgttccacgtaacggccatccccgccctggctctcaaccatggatttaaggcacttaagggcacttccgtccttcatagcgcctttggcaagcttcctgcactgctccatatccccctttcctgccatgtgaagcatgtttgcagccagttccagggatacacaggtcaaatcctccggtccgcggcccttcagggtctcaatggcttcctccatctccagggaattgccgatggcatggcccagcggtacgtccatattggttatgagggcgcagcagcgccgtccggccagggttccgatggaaaccatctcccgggccaggctgatggaatcctccagggatttcatgaaagcgccgcttcccgtctttacatccaggacaatgcagtcgctgccggccgccagttttttgctcatgatggacgaggcgataaggggaatgctgtccacggtggccgtcacatcccgcagggcataaagctttttatccgccggcaccatgtttcccgactggccgataagggccaggccgttttcattgacaatacggaaaaattcgtcccttggtatggcagtcttaaaccctggaatgctctccagcttatccacggttcctccggtgtgtcccaggccccgtccgctcatcttggccaccttgacgccgcaggcagccacaatggggcctgtcaccagggtcgtcttatcccccacgccgccggtgctgtgtttatccgccttgattccctctatgggcgtcaaatccaccatgtccccggaatgcgccatctccagtgtcagatctgttatctcccggtcatccatgcccttaaaataaacggccatcagcatggctgacatctgatagtcgggaatgtctccggccacgaattcacgcaccatataggcaatctcctccgcggaaagagaaccgccccgtttcttcttttcaatcaggtcatacattctcatgtcacacacctcccaaatggtccggtccaaagctctccggaagcagctgggccagagtatattcccggtattcctccgcgcttttagccaggataatgcaaaatgaatccggtttacagaactcccgcatgacctgccggcacactccgcagggcggacagtaatccccggcctttccatcaggacccccgcatatgacaatggcctcaaactccctctcaccctcgctcactgccttcgcaaaggcgcaccgctccgcgcagataccgggactgtatgctgcattctctatgttgttgcctgtgtacaccttcccatccctgcaaagcagggctgccgatacatgaaaatgggaataaggcgcataggagcgcccaagaccgtccagtgctgtccgtatcaatgcttttctctccaaattacccctccttctgcccggaccagccggatccccggacgctgccggcggtccggtccctggccggatgttctccttctattataatataagccagccgcttaaacaagggaaacaaactgcccctccacatagcttctcaaatcctccggcgacagggtgacctgtacgcctctctgtcccgcgctgaccataacggtgtcgtaaagctgggccatttcttctatataagtggggaaatgcttcttcatgccgacaggagaacacccgccgcgtatgtagccggtgattcccagcatatcctttacatgaatcatctccactttcttctcccccgcggccctggcagccttcttaaggtccagctcctcatccacaggaatacagcacaccaggtatccctttttttcccccttcagcaccagggtcttatacatccggtcgtggtccacccccataagatctgcggcgtggctgccggaaaggtcgttttcatccacctcataggtccctgtcttatacgctatatgagccgcgtccaacagacgcatcacatttgtcttaaccatatcaagcactccttttcaccggcccgggttttacccgcggaccatgtttcaggaatatcatactcttttttccactgcccgtcaatcaatcccggacagcgtccccaaaaagccttcaaaagaaagctgcatggagtattcacaaaacaatattatacggttataatgggaaataaatacacaaaggacaggaaaggaaatctcatatatggaaaagaatgatatcttcatcatacacggaaccgattacaaaaacatggctaagcgggtcctggaacaggcgggcgtggcggcagatattggtgatacaaataaaaaggtggcattaaagcccaatctggtgactgccaaggcgccctccagcggagccaccacccacggcgaactgctggccggtgtcatagaatacctccaggaacacggctttcaaaacatcaccatcatggagggttcctgggtcggagaccacacggaagacgccttccgggccgcaggataccatcaggtgtgcagccggtacggcgtacccttcgtggatttgcagcgcgatacctggaaggaatacgatgcgggaggaataaaaatcaagctgtgcgacaaggcagctgccgtggattacatgataaacatgcccgtgctgaagggacactgccagaccaccgtgacctgcgccctgaaaaacaacaagggcgtgattcccaactcggaaaagcgccgcttccacaccctggggcttcacaagcccattgcccacctaaacaccattgcccgcaacgacttcatcctggtggacaatatctgcggtgatttggattttgaggagggaggcaatcccgtggtcatgaaccgtgtgctgggctttaaagatccggtgctctgcgacgcctttgtatgcgactgcatgggctactcggtggacgatgtgccttacataaccatggcccggaacctgggtgtgggaagcacggacacggcccatgccaacatgatttatctgaacagggcaacagaggcccacagcaaattccgcatgaccaggcgcgtacagcacctggccgcctacacggccccggagaatgcgtgcagcgcctgctacggttcccttatatatgccctggatcgtctcaacgacatgggatatctgagaaagggcctgcctcctgtgtgcatcggccagggctacaagggacaggagggcgccatcggcgtgggccaatgtacctcctgctttgccaaaaccctgggcggctgcccgcctaaagcagcggatatcgtggagtttttgagcaatcaatggcaataggcctgttttcttaaagcccccgttccctgagccaggccataatgtgggccccatatgccttttccttcttaagaagggtaaaatggtccgctcccttgacaaacaccacctttgaatcgggaatctgttcccccatccacagggagtggcgggggcggatcatatccccgcggcccgtaagaatcaggaccggcgcctggatgcaggacagcttctccttgtccagcctgggccatctggccataaggccgaacagctggcggcttttaaccgccttatccctgacgccccgcggcagcggtaccttctccagaccgcgccacagggcgtattttaatttcacctccaacagcgaggcagtgctcatgcctctgggcagggcatttccgctgactgccaccacggcggacacacgtcccggataacagctggccgtctccagggccacgtttgccccgtcgctgaatcccagtatcactgccctgggcacatggaggaattccatgacctgaaccacatccgccgccatatccgggatggtcagctctcccctggcagcatctcccctcataagagaggacccatggcccctgctgtccatgagaatcaccctgtaataccggctcataagctctgacagcctggcaaatatctcgtggctctcaccattgccgtggagcatgatgagaggcatcccttggcccatttccttataataaagggaagcaaaactgttgtccacatatccttccttcattggctcagcctccttcctgttgaccttcaccatatcacacctccggaaaaatgtaaatacaggcacagcccggcagatagaagtcctgccgggctgtgagcatacgggtctgtaagacccgctcttatcttctgttagtattggctttttccacgtgaatattctttcccttaatcttggcatgggccatggccttcagcacatcatcggcatagcgtcccggcacatccacaaaggtatatccgtcatacatgtcaatgcttcccaccatgcgtcccggaattcctgattccccggcaaccgctcccagaatgtctcctggggtgattctctgggccttgccgatgttgatgaacagtcttgccatcttctcgtccccttcgcccagcacgtaatccacagcagcgcggtccgttgctcccttgcggcggtttccgtaggagctgcgctcacggcctctgccgcggctgcttccccgtccaaagctgtccagttcatcgagagaacgggctgtctcaaagctgtcgatgatgtcttcgctctcgtctcccatactcatcctgagaagggccgcggccaaatccatggaggtataatcctcctccataagcttcttctcaatgatgttcaccatcttggtcagatccgtgtcatttaacacttcctgcacctggtccagaatcttctccaccttgatttccgtgatatcatttaaagacggaatggcctgaggaatgattttagtcttgcagtaacgctggatatccctgagcttatagacctccttgcccataacaaggctgaatgccttcccttcccttcccgctctgccggtacggccgatgcggtgtacgtagtactcgtcatcctgaggaatatcataattgaacacagcttccacatcccctacatctatgcccctcgcagccacatccgtggccaccagaatgtcggtgcgcccgttacggaagctgtccatgacacggtcacgctggacctgctttaaatctccatgaagtccttccgcaaaatatcctcttccctgcagctcctgcaccaggtcatccacctgacgctttgtattgcagaacacaatggaaagcttcggcgcatacatatccagcagacggctcataacctccaccttgttcttcggcttaacctcataatagtactgggtcaccttaggcacggtcagctccttcttaatcacgcgaaccgtcaccggatccttctggaacttcctggcaatctccgcaatggcctggggcatggtggctgagaacatcagcgtctggcgctcctcaggcagctgacttaagatagtctccatatcctccaggaatcccatattcagcatctcatccgcttcatccagcaccacagtgagaacatggtcagcctttatcgtcttccttctcatatggtccatgacacggcccggtgttcccacgataacctgtgttccgtcctttaaggaacggatctgctttacgatatcctggccgccgtatataggcagcaccttcacaccgtgcatgaactttgcaaaacggcgcatctcctccgccacctggatggccagctccctggtaggaagcaacacgatagcctgaagcttcttcaccttcgggtccaccttctgaagaagaggcagaccgaaggcggctgtcttgcctgttccggtctgtgcctggccaatcatgtcccgtccctccatggctaccggaatggcctgagcctgaatcggcgatgcctcttcaaaccccatctctgtgatggcgcggataatccgctcgtctaattgtaactcgtcaaacttaactgtctccatataaagttaatatcctttcttcctctgccgttccatataaaagagcctccggcaggccgccttgtgcatatcccctgactccgctgccacgcatacgtcataccatgcaccgcaatttattagtttcttcgtgaaacgaagtcctccacgcgaacaaaaaaacgagggataaacaggcacgtctcgggcctttcatcctctcgcttcgtacgattattaactataacagatataaaagttagtgtcaatggaggctctatagatttttatcctaattttagggccggttcccgtgaaaatgccggaatgaagtgattttcacggtccaattccgcttttttcatgaattttccagacatacagccgattaaaatagctatttttacacaatttcacattctattaagggctttgcgtatccggggaagcattttcctggtgtactcatagccctgttccatacatcctcccatctgttcaaaggtcagaagacctgcctttggacttaagggaggcttcagcagcatctccccagcggaagcgcactccttcaggcggccgctcatgatggaaaaggagtgggaagccacctccatgacggaacggtccgaaggggcttcatagtcccctgcgatgtccaccgccagcacatcctggataccggctgcctgcagaagatttaccggcagtatatccgtgacgcctccgtccaccagaagataccgccccaccttcctgggagcgaatatggcaggcacactggctccggccatcatggcttcacacagatatccgttccattcccatgtcacgcgctccatctcccgtacctggtcgctgtttgtaaagcagatggtatttccgctgaccaggtccactgccggtatgaccaacgtaagcacagtctcatccatatgcctccggccggtcagctgaaaaaaataatccagcagcttatctcctttaataaggccggacaggcttacaccctttccggccagcagctgaggcatgaatgccagcaggccgctgtaatccgggtccagataatcacctccgtgtttctcaaggtgaagcactgcctgttccatttgtgacacgggcattccggaagcgatcagccctgccacaattccccctgcgctggctccggccactgcatcagggcgcagtcccgcctccacaagggctttaaacacccccacatgggccgctcctctggttccgccgcctgccagtgccaatccatatcccataacaaatccctccgccctatcccgtatcaacgccgtaccggtaataggtacatatgcaccggcacagccgaatatgacagagggaagcaatgaggcccggtataattcctaaaccctgaccttcactacaatcttacgcaccttacagggcgcgcctgcaacgcatctgggcttgtgggcgtcctcaggggctaccacggcgcagtccccagcctccaggaggatggtcccgccctgctccggttccttaaaaaacacaatatcgtccgcctcattgtaaggagcatcctccaaaagccccgcgcgtttgacgtagcccaactgctcctggccttccaccacatactgtatatcaaaataccggttgtgggactcatacttgcaggtatccgcgggcatggtggtatattcctgcaccgaagcaaagacctcatccccgtcaatgtcagcgcggcccaggggcagcgcctttaaatccgtttttcttaagaactcatagccttttttgaatttttcttccaggtaatcatatttctggattaaatcaatacttgtggccagcatatcaaccttcctttcctttaccgtctccggcaaatgccgcgatctcttcatagagggccgtggctgcctccttgtcatagccgtacatgagcagcacatccaggacatatggagtataggggattccggtcaggcggcgggcaaactccatgcccccaatctctcccaggcatatcatacgggaacggttggaaaatggctttctccacagctccaccttttctgtccgggtatatatggtatcctttttcctgtactccgtcacgtggaacagctcatgggccagcagtacatcctccaccgcctgtttacccagaagcccctccagcctttctctccgaatcagctcctgcgcccgcctggcgctgtccatataaatggtgacggaatccggttcccggtattgggcgaaaatcacatggcctccgcccaccggcacctggggcgtggataccttaaggcccatccgggcggcaatatcccagacatttgccccctttttaagcagctccgcctcattccgcccgcactctgctgccctggagccgtatgccagcttctgttccctggtaaactttccttccagaggatccctggaccaggcgtagaggtgccagaccgaatcatccagggacagaaggtgttccatcatggaatacagggaccgttcccttgtgggagccgccatctgtttcatcatgaccctttgctctcctgccatttccctgctgtttccaaaaaaagcgtgcagcagctttcttccgtcctctctcttcaccccaatacctcctcctcgcccgtcctcttctattctacaactgattcttcgctccgacaatcacaatatcttccgacgggtccaccatctgcatttccacatccatcagcatgagaatctgctccagctcgcctgtgccgttaaagtccatgactctggctcccacgcacagatagtagtcgggccgcagaatggcatccgccttgaaaatggccatttcctcccacatcccggaaacaatgctgcggtatgaggacgccttggcaaggactgccttcccatccgtcctctgtaccttgataaatcccttcttatccagaatacgcaacggtctgcgtcctctgctgtccatattatagacatagaagttaggcgtctggcccaccaggttcagttctcccagttttgcccttaaatcctctgccgccaggttcctggcctcctcctcggtgcactccttaagcaggtccgttgtcttgacctccgtggaacccatggcaatggcagtgagcttggaggtctgggggtcaatttcaatgtggacctccacggaaccgggcgcggcgccgctctccaccgccttttccgcagcctcccccttaatgctccttatatcctcaggcgtgggattgggaaccacccgctccaccacatcccggaccatggccagggccacgccgatggaggaaatgacctctgcattctcaggcacgctgtacttaatattcatcttattggcgcagaacccaatcagggatgtggcgccgccgcccacgcccacaagggatatctgatcgtgctccaggcggtacttgtcagccagctccatgataatgggttcgatcttctcataggccctggtgagaatctgggcagccacatcctccaccgtggtgtgcagataatcggcaatgggcttcatggcctttctggccgcattcacatttccgtaggaaaagtcctttgggttcaccaggcccagcacattggccgcgcagctgttggtgacggtgatgcgcttgccgctctttaaacggatggccacgtaatcctccggatccccctccttcggggagaagaactccagccggggctccgcgatttcatcctcatccgtaaatacggcgtaatccagccccgcaatatgagcggaacggggacccacatcgtggacgccgctcttgttcacccgaatcatgcttcctcctgcaacgcccagcacccgcacatccagggaactgatatatgtcctgtgcccgcccaccacagagtaatcaatggcagggcgtccgttcttgataacgccgatattggtggtggtgccccccacctcaaagtacacgccgttggacgcccttaagtacatgagagagcccatgacgctggcagccgggccggaaagcatggtcagtaccggccgcttcttcatctcattgatttccatgacgccgccgtctccgcgcataatcatgagaggcacatccacgccggccttcctgacactctcctcagtggagttggccgtgttcagcatctttggcaggatgctggcgttgatggccgctgtcctggtccgtctggtcaggccgtagagcttggtaatgtccgaggcaacggttgtctccatgcccatctcatcgtgggcaatctcaaacacaaactgttccccggcaatgtcgtccaccccgtaagcatctgatgccaccagtacctgggcgccctccgccttaagctcctttaccgccttcctgaccgtatcctcgtcctcttcactgtcgctcaaatagcggttctttatccggatgcttctgccggatcccaggtcgatatccttaaggcgggtctggtgctttgccagaaagccctccattcctcctggccccatgcccagcacgcccacgcaggccacatccccttctatcagggcattggtggcctgggtagtgctgtgggccacgaaaataacatcctcaggggcaatatcattttcccttaagcagttctggaatgccttcaccacgccggccgccacgccgtatctgtcatcgtgtgtggtcttgacagaagattttcctatgatttcatgtgtggcgttgtcaatcgcaaccgcctttgtatgggttcctccaacatcgattcccattctcaccagtctgtttcccatgtttcttctcctcccgttaaccaaacatgataaatgtaataacctgcaggatgcagcagataatccagccgcacaccacgctcatctttaagaattccttggtagatacctttgcgtagctgatgccccatacaatccatgactgggtgatgcagcaggacacgttcataaccgtggtggcggcaatcatcaggggagccaggaaggccgcctcaaagcctaccccctttaggatgcccagggtggccgcgccgcagccgtaaagggtgaaggggcccctgaacattccaagcggcgccagcacacagaagataacggtgataaataaggtgctgtgtggaatgatattgcccagcagcgcattgaaataggggatgcacagctccgccgccttgttgaacatagggaccaccagcaggaaccctaccaggggagccgtgtccaccacgccgtcaaagaagtccttgttaaaggtcctgcaggcagcccggaagctttttagttttccgcatacaaacagcgcatagaagccgccgatcagaaagcccatgataatgggaaccttgaatacaatcagaaggaacacagggataaagggtgtcagcagggacggcgtgggagcaaaatccagtttacgccggaccggtcttctggctgcccaggagtgaaccgatttctttctcatgcagaacagaatcaggatgatggtaaataccagctgtactgccagcgcaatgccgccccatttcacatactgctcataggggtacagaaccttgccgtccccatccagaaagaatgcggtgtactgcccgaagagcaccgggttcaaaaacatgcccgcgccgatgctcagcatgaaggatacaacggacagcaccttgggaattcccagggacataaagatgggaaggatgataacgccgatggccaccactgcgcccgctccaaacagggaggaaaatatggcagccgtaacaatgcataagagaatgcaggtgatggccggcttgtcaccgcccagctccgtggtcttgcggataagggttgccgcgatgcctgtttctaacagcacccgcccgaaccacgcgccaaacactacattcacaagcactgagccccatccctcaggaccgctctggaacaccttggaaaatgcctgtatccatgtgatccggatgctgtccccatttgccgcgataaaatcaggattggacgccagaaggttgccggtcatgggaagaatggtccagagaatggccataatcagcattcccatcatcaggttgccgcccctggccgcgtagacggccaggccaaagaacgatgctaaaatcagtattcctatgatatattccatgagttaaatctcccctctatattgctcttaaacgttaccttctagcgctcaaggctgttaagcgtttcccatacctcgtcaatgaccggaattccgtcccttgtattgttttccctggtgataagttccagttctcccggataatacacctccccgccctctctgattggctctgaggacttgatgtctgccaggatttcatccactatggagtccgtttcctccggagtgttgaatcttaaggggtcaatggctatcataatctggctcagtcccacctcgtctccaaaggtgccaatcctgctcacggaattgccgtttgtcagaacagttgctatcaggtccagcgcaatggagatgccgctgcccttccagtatcccatgggaagcaccctccatgtcttctcaatctcagccgggtctgtggtcaggttgccctttgtatcatagccgccgggaaccggaagctgctgtcccttcagctttgcttcctcaatctttccgtaagagaactgggatacagcgcagtcaatcacggcatgtttcccgctgcttctgggaatagacatgataaatggattgtttccgatctttctgtcctttccgccccaggcaggcatgttgggcatggtgttggaccagcagataccgatgcatcccttgtccgctgcctgccagccgtagctgccgccgcgcatccaatggttattatttccaagggccaccacgcccacgccgtactcctttgccagctccacggcccggtccatggccagctttgcattgagggggccgaagcctctgtggccgttccatcgctcaatggctcccatggaggattcacaggatgcaatggctccggaatcaatttctcccttatccagatattccaccaccctggggaagcggttcacaccgtgggaatatacgccgtccaggctattgtttgcaaatacggtggccgcgtcctctgcatgctttcctgaaaaacctctgctctccaaaatcccctgaaacttctttaacaaatcctcatactgtactctcatggctctctccttttatattagctttcttttttaagaaagcgctttctcatgacaccattataacatcaatcagatttgtgtcaatattcaagtgtgtatcccctttatttttatgcataatgtactatttatccattgtttttttgtgcattataattgtgttttttattctttataaaagcgttttctcattttggcaaaactaaaaggagccggaacaaacataactttgtttttaccaactccaattataaaaaagcgcttttctatatacagttataccgagccctgtaccgcgttatatgggcaattgcatattacaaaaacaaatcacaaaagtagattcccccctgccggcctcagcccacagcacagccggctgtatgccgtgtggatatacgcagaccgggcgtctgatatccgcgggaaccgccgcaatgcagcgccggcttatccgctctctcaaaatgacgcggacccccgcaccaccagctccggctggatggccacgcttgtggccgactcctttccttccatcctgtccctgagaagggaagcgcacattccgcccaaaagctccggcttgttgtccagggtagccagctcaggttcgcatattctggaatccggcgaattattacagccggtaatggctatatcctccggcacccggtatcccctttccttaaattccttcatgaggccgatggctgtgatatcctcaccacatatcaccccgttgaccggcatgccggtagagagaatctttccggcggcatttcttccgccctccaaactgctttcgtccacaatcaccacccggtcgtttccgtcaggcacatccctcagcttcatggcctccaaaaagccctgccgctttgccctgccgctgtccgtggcaatgtcaaagacatagaacaaatccatgcgcccatggtcaaacatataatccgaagccatgcggattgcctttgtatcatctaccagaaccgaataaaaattaggcagcttcacctgtccgttggcaatgactacaggcgtatcctttatcttggcagtaatctcaggatattttatcagttcattgaatacagatccaataagcacaattccgtccgtctgcttctctgacagtatctcaaaataccggtcgcactcctgtacggagccgcctgtattgcacacggaaacattgtatcccagattgctgaattcctgttcaatcacgtatatcatccttgcataatgcgtcacccgcacatccaccgtcaggatggcaatattcttcatggtcttggaaaccatgcccctggctatggcgctgggcttatagtcatactttttaagaaccgcctccaccctgtcccttatcttgggattcacattccccttattgttgagcacccgtgaaaccgtggaaatggaagtccccgcctcggccgcaatatcataaatattcatcccttcaccccttttatggattaacgcttctgtactttcaccccttattctgcttcagttttttgcgaaagccctttccttatattgtaatggactttcccggattttgcaagataaatgtcctgcggtttcttgtcggttttagccggttctggccggctttgaatgcgatataaaatcggatatggaatggatgtgatgctaaaaacagcagccggccgcatccctcccatacaggattccccgttccgctgctgtttctcaatgcccctaaggccagtaccaaaactgtaaattattattcctaaaactgcacaacgtcctttatctcttctgcccgttccacatgttcggcataaaggacaggcccttcaccgtgataatccttctggtattcaatgcctatctttgcccggacctttacccactgctttgtcttgtaatcctccgctccgggccatttgcacatgaagcccagaaacgtcatgtccgcctcgcagcatgtcatggccatgcggccaggcacaaactggcccttggggaatttggtagacttaagaaccatggcagtgaattccaccaccttgtccttatagcgctctggctggtccatacagtcaatataccaaataccgtaatcctcgggcttaatttcaattacatccgcgccaaggtcataggggaggtcctcttccagagcagcctgttcaatttccccctccttgtcctccaggacaatctcgctttcccggctcatggcacgtatggtcctgcggtacgcggtcagcttgtcgtccggaattccgtcgcaccggttcacgatgaccagctccgagccccgcagcatggcccccagaagcggcttcatattctgcacgtagagctcaaaggtagaaccgtcaataatggtaatctgctgataaatggtccagtcatccggcagctttaaatcatcctggttccacatgccgttccactccatcagcacacgttccggctgatagataacctccagttcattgagatactggggagtcagctttttcatgtcatccacaaacaccgctgccgttttattcttctttaactttttctcgtcatattccgtatcaccttcctcacacacaatgaggagggtctttccctctgttttaaaatagtcctgctgcatggtaaaatccagaaactgggtcttaccggcctccaggaaaccattgatcaaaaacaagggcatgatatcgtcttctatctcataagccatgtctgtttccccttatccaatcagcctctgccgaatacgctgttcagctcttcctctttcaggctggcgccaatcacgcataccttgcctgtataatccggcttgccctggcggatttcatactgttccggcaccagatcaaaatacagccactcgccgggattctctgtggggagcatgcccttggcccttaacacatctcccaactccctggtggaggaaaggcgcttcaggatatcctccagctgttcataggtcaccggtacaatggtttccattccccagctggtaaacacctcgtccgcatgatgatggtgatggtcgtggtggtcatgaccgcagccgcagccatcgtggtgatggtcgtggcattcctcaccatggtcatggtcgtggtgcccgcagcattccccgtcgtggtcatgatggtgatgagcaaagctctcctcaccgtggtcatggacatggcggctctcccgcacctctgccagcaaatcatccagcatggtatccttcttctcaataatttccagaagctggcttccgccaagctggcccaaaggagtggtgatgatgacagcattggcgttcttctcccgaatcatttccacatccttctgtatcttagaagcatcggtaatgtccgtacggctcagtacgatggttcccgcattctctatctggttattgaagaactctccgaaattcttcatgtacatcttgcattttgccgcatccacaatggtcacagcgctgtttagctccacatccatgtcagccgatacgtcaatgactgccttcatcacatctgacagcttgcccacgccggatggctcaatgatgatacgctccggtttgtattgtgtcagcacctcagccagggatgtgccgaagtcgcctaccagggagcagcatatgcagcctgaattcatctcccggatttcaatgcctgaatccttcagaaaaccgccgtcaattccaatctcgccaaactcattctcaatcaggacaacctgttctccggaaatggcctcctccaggagcttcttaatgaacgtggtcttgccagctcccaggaatccggagataatatcaatctttgtcattttattctttccctctttctcaatatcagaagccctgccaggctctaaagcaagcaaaaccatccgccgccccgtcctgacaaagccctggttgtaaagcctgtcaattgaatattgtggcacattcactggataaagtcaagacatatggccctattctattgtcattctgtttctattctgctgtatcacactttcattttacccatattttaaccgttccaaagggttatgtaagagtttttgataaaaatcgagtaggaggcggtgattaaccgccgtcctctcacagcaccgtacgtacggttctcgtatacggcgctttcaatagttggtgtgcagagactgataggctgcggctaagtcataaaagccccagtttatcagtctttctttacttaatgcccagttgaccgccttgtttccggcattgaaccagtatcccttgcggtcgtaggctattgttgccgcataatggctgtctactcccagtcctatgagtttcctcattctggttttgggcagtttccactgtttccagatacacatccgtatccggcggtacaaccatccattcaggctttcgatgtttttcttcatgtccgctatcccatagtagttcagccatcctctcatgtagacttttatcttttccttggttcggatgatactcccgcacctgctccgggaagtaagcctgcgcagtttctccttggctttcttccatgacgttccatggacacggatataggtccctgttccgttcttcccaaaacaaaaaccaaggaacttaaaattttggattgcgaacacactgaccgttcggctcttttcccgattcactctcagtttcagccttgcctccagatatttcgtgctggattccagcagtcgttctgccgcccgttcgctctttgccagcagtacgatgtcgtctgcatagcggatacacggtacgccccgtctgtggaactcccagtcgaactcattcagatacgcgtttgctaagagtggggatagatttcctccctgcggggagccttccttcgtttctgtcacaacaccgttttccatcactccacttttcaggtaccgcttcaccatctgcaccactctttcgtcttttacttgtttcctcaacaggttcagcagtatcgtatggttcagcgtatcaaagtatttcgataagtcgagaactactgccctcgtgtatccctgttcgatatactcctttatcctgagaatggcgtcttttgctcctcgtcccggacgatagccgaagctgtctttcgagaacaatggttcgtagattggcatgagctgttgaagcattgcctgctggatgatacggtctattacggtggggataccaagctttcgtatccctccctccggcttcggaatctccacacgcctgactggagatggggtatacttccccttcctgattctctctaccagttcatagttattctccctcagccatggtaacgccgcttcaatggtcattccatccactcccggcgctcccttgtttgccttcactcttttgtaagccctgttcagattttccttgttcagtatcttacttaagatgtctggctctgcactgtctctttccttccatatccggttgaatgagcggtgcgctctcacataccctttgcgttccgcgctatctctttgcgagcagctttctctgttttctgtacccatctgcccattcctcctttccctgtcgtactaaagactcctattgattcggtccttcactgaaaacagctactatgacctctgctgacttctgtacgctcagcattacctctcggcaatggttactcctttcagagcattccgtacagacctccctgggtaccacacgtttctttccctccatctatctgccgcatttactgtacacgattccgtgtagctatcgggcttcatcttgtgttgcagacttaccctcatgtacagccttctatacggtttctgtccgtcagaccagaggtttgcccatgggttcgttccccacatccggcttccttcagatttgcagtcacctgcaacacccttgccttcggctatatccttcccgctaccaggtggattcaggactttcacccgttagaaacgtgcgccgccaggcgcacaacacagcaaacagccaggcagaccctcatgcctgcctggctgttgtcccgattccgcggggctctagcccattctttgctccttcttaaatatccaaatacatatgcatcggataggaaagatactccacaacctccagcttctccaccgtaatataacctgccggcgcgtttaggatggtcggaatgcggtttacaatcgtggcgcaggtgtgctccacggtggccggcttctgcacaaagaacgtggtgtccggttctcctatgattttccagtcgcacaaatcaccgtcatccggcccgtataccttaccgatgcactgagtctcaataaccggcccctggaaggtttcggtggtcaccacggcgctcatgccgatgcagtttccctttggtatggtcgttcccatggtctctgaatacaagtccgtggggtaaaaataaggcacgcacttctgtgactgggacttgatggtccatcccatcttattgcacagagcttcattggaattccagacataacagggctccagtgtctccggatgagcaatccgggcctcaaactcctccgccgtaagccccacgccgtgggcctttgccagggccagcccgtaatcctcaacgttatagctggtggctccctcaatcctgtctatgcggtgtacacctcctgccacacagccaatcatgttaatccagaaaatgtcctgcataccggcgcctacaacggtgcagccgttttccttggccagcttatccagcctgttggtgatggctgaggacgtggtccatggatagatagcctcctcgcaggtggttactacattgattcctctggacacgcacttctcaaaatggggatatacgtccgtcatgaagctgaacagggttataatggcaatatcagcgtcgcactcgtccaggaccgcgtcggcgtcgtctcttatcaccacgcccagctttgtcccaagccccgcaaagtcacctacgtccattcctaccacggccggattcacatcgattgcccctacaatctcagctcccttctcatagagatagcgcagaatgtaattggccatcttgccgcagccatactgtaccacacggattttctcgcaattcatcatggttcttaaacccctttcctgaaaataagttacgtgttattagcttctgttaatagtataaagcttatacacggtatcaggtcaagggttatttttcctgaaagataccggcacctgaaggcgcagaaacatacctctctcctgcatatccatgggcacctccgccaccacctcgcagatgtagtcgcctgtcacctggtaatcccttgtcctgatttcctccaccagacggcccatatactccttttccttttcaaagccattgcagtaaatgcacaggtatgtactggccggtatctccgtaatcaggctgtcttttacaaagccccggtccaccagcacaaatatttccgtggaataatacttcccctccatcagatattccctgcgcatcacggtgcctgcgttgtaaaaatagatgggggagagctggtttgcaatcaggttctccttcaaatccctcagtatcttttcatacacatcaatgtcataatcatagaaattcaccccagaatccgtcatatacgtcagtctcccgggtatgtattccagtacaatggttccgtccggcggcgcgttttcataccattcatagctttcaagtgtccgctctatggcccttctctggtacatcagctccctggatcttaactccagctcctccaggttccggtgcaggattgtcttgaacatgtcaagttcaaaatgagtcagctgctccctgatatccttcagcgacatgcccagagccttcatgtgctgaatcatatccagctgggcgctctggcggatatcgtagtaacggtatccattttccgcatcccggtacatgggtgaaaacagccctgccttgtcatatagcctcaatgcctgctctgacagcccgttcagccgggccatctgtcctattgacagttctttcacagtatgcaccaccttttcattatgtataacttccaactagcgcgtatttttctagtttcatatagcataattatactaaaaaaaccttataccggcaataatgtttcggatgtattgtcaaaaatttgtcttacaattaacacttaaggaaatcatcctccagtcttctttggcagacttacaaccaccgcgaaaaaagccggagaaagaaaaaagccggagaaaacagcagcctgtcagcacaggcagccattcctccggccagattatccgctggacttgtcatccttcttatacattcttggtgagatgcttcacgattttctccgcatcctcctgttttccaatcaccatcaggtgggtatcacctgctatgacatggtcggcgccgggcatgaacctcatgtgtccgtccggactcttcaccgcaatgaccgatatgccgtacagccgacggatatcggaatcctttatgctctttcccacccactggggaaggggtttgatttcgtagatggaaataccgtctgccagttccgtataatcaaacacattgttggcgctgtaacgcaccgccaccttctcggccacatcccggtccggatagaccacctcgtccgctccgttctttagcagcagtctggcgtgaatatctcggttagccttgctgacaacgtactttgcccctatctccttaatcagactggtaacctccagactgttctggaaattattcccaatacatatgaagcagatatcgaaattgccgattcccaggctcttaagcactgcctcattggtacagtctccaatcttggcgctgaccacatagggcaggacaggctccagcttttcctccgatatgtccactgccatgatttgattatcatgcttggccagattctcacacaggtgctggccaaaccttccgattccgataacaagtattgatttcatttctaatacccctctctatcctatggtaatccgctctgccggcagctgcacatggggcttgcggttggacctggtaaatgccagggcaaaggacaagcttccgattcgtccgcagtacataagcagtataataacaatccgcgaaaatgagttcaggctcctggtaactcccgtgctcattcctgaggttccaatggccgaacacgtctcaaagaacacatccgacatgggcaggttctgggataccataatggctatggtggctgccagcatcagccccaggttgatggtcaggatacaggctgactgcctgatggactcgtcctccagccttcttccgaatatctccaccccgtatgtctggcggatattggaatggacgtaaagcagaagcactgccagggtacttgtcttgataccgccggccgtggaccccggacttcctccgataaacatgagaatggctgacaggaacttgctcccgtctgtcagggccgccgtgtctacattgttgaatcccgctgtcctgggagtgaccgcgctgaagaaacaggccaggaatgtctcggaaccattcagtcccactaggatattgccacgctccatcaggtaaaagagtatggtgcttgtgatcagaagtaccgccgttgtaaccagcacgattttggtgtgaagcatgtagtggcggaaatccagtttcttcctggacaaatcatcccagacaatgaatccgatgccgcccgtgataatcaggaaggatatggttcctatgaccacccagtccccctcataattgcagagggaaatatattggctggtgtgtcccatcaggtcaaagcccgcgttgcagaaggctgaaacagaatgaaatattccataccaggtaccacggaccagaccgtactccggaataaaccggcaggacagtatgacagcgcctgccccctcaaatatagctgtgccgataatgattttcttagccagcttcaccatgccgccaatctgcagggtgttgacgctttcctgcataagcccccgctccttaagcccgattttccttctcagcacaatggaaaggaaaatgccgatgctgataaatcccagaccgcccagctgaatcagcaccagcagcaccatctggccgaacaggctccactgggtccaggtatccgccaccaccagtcccgtcacgcaggaagcgctggcggccgtaaacagacagttgaggaaaggctcgctctgaccatccctgctggcaatgggaagcatcagaagcaggctgcctgtcatgatgatcaggaaaaatccataggcaatgaactgggtctgtgatatatgtttttttaaacggtaatgttttggtttttttccaaacaacttctcattcatgttcccctcattttaaatcccacaagttatttttatggcgaatcgctccgcataaagagcattttagcactttagccccggactgtctactgaaaaacaggaaataaccggccggtgaaataaccggccggtaaaacagccggccggagacatcagcctctcaggcggcccagtgactgccacgccataaacagcaggaaggcgcacaggttcaccaccaccacgctggccccggccggtatggaaaactggtaggatgccaccatgcccgcgaaaaagcaggccagggacaggatacctgaggacaccatgacgcctccgaagcttttgaatacccgcatggaggaaaggcagggaaatatcacgaggctggagatgagcatggcccccatcatcctcattcccagtacaatggtcactgccgtgagaacggctatgatgatattgtagcggcccacattgacccctgttgccttggcaaaattctcgtcaaaggtcaccgcaaatatgcggttgtagcatatcacaaacaaccccagcactaccagggacagcaccacgctgagccatacatcctccctgctcatggccaggatgctcccgaacatatagctgctgacgtccgtggtcatgcccgttgtcagtgaggtgacaatgattcctaacgccagggcgctggctgatataagggcaatggctgcatcgcttttaatccggctgttctccgtaatccggagcaggaaaaaggcggccagcaccaccacgggaatggatatcctgagaggggaccagcccatggccagggcaatggacagggctccaaaggatacatgggacaatccgtccccaatcatactgtaccgcctgagcaccaggctcacccccagcagagaggcgcacagggataccatcatgccgcccgcaagagccctcaccagaaacggataggaaagcatttcacgtatcagattcatgatttttcctccttgtgcatatgcagcttcaccgcgtggcatccggctgttggcttgcatctgccctgctccttctcatggaaaaaatgaccggctgcctggctgttcatatagtcatgggccggtccgtaaaacaggacccttttttgcaggtgaagtattttatttgcctcctccaccgcgtttctcaggtcatgggacaccataaggatggccaccttatcctcccggttcagcctccggatcatggcgtaaaactcctgaatagccgtgggatctaaccccgtgatgggctcgtccaatatcagcagggatctggtggcgcacagggccctggctatgagcacccgctgctgctgcccgccggacagctcccggtagcactgctttctgaggggcgtaatacccagcttctccatgttcctgtccgcaatctctttttctttcttagaataaaacggaagcattcccctgcggtttaagcagccgcttaataccacttctgagacagtggcaggaaaatccttctgagcggcagtctgctggggcagataaccgataccggtcctctttagctcctccgccgttacaagcttcccgccggcaggcttgattaagcccaaaagccccttcatcagagtactcttgccggagccgttctcacccacgatacacagataatcccccgggtccacttccatatttacatcgattacagcatcctggttatcatatccgaaatccacatgctggcattgaattaatggtgacatattttacctcttttacattggttgttccggctcaggttattccagcccataccgcaggttctccacattctgtctcatgagctggagataggtgacgccctcgtcgaactgcttcctggtcacgttgtggcaggaatggagaagaaggggcgctgcccctgtttcctcctgaatgatttccgctgtcctgtggctggaaagttccaggtaatagacggccggaatccggtcctcttttaccttgtctatcagataggcaatggtactggcgctgggctccgtgtccccgctgcacccggaaaaggcagcgcggtaggaaaggccgtactcatccgcgaaataacggaaaggaaacttgtccgccaccacaatcatgtggaggcgtccctggtctgccacctgtctgaactggctgtccaagtcctcaagctcctgcaaatacgcctgggtattggcctcaaagcggctttgctccccaggggccgcctccgccagggtccggcttatgatttttacgatggcctgagcgttgaccggcgaggtccatatatgctcatcgtattcaatgtgcatctcatggccgtcttcctcctcatggtcatccttctcatgaccatcctcctcatagacgtcctcatggtggtgttcgttctcctccatgccttccacatgctcttcctccaccacatccacataatccatcatggtcaaaaccttcatgtggctggtgtccagggagccaagcaccttcttcacccactgctccatctcgccgccgttgcaaatcagcacatcggcctcctgcatggcgatcatatctgcgggcgtaggttcaaaggaatggctgtccatacccgcgggcaccaccagcttaagcttcaccctgtcccccgcaatctgacgcacaaaatcatagtagggaaagatggtagtcaccacgagtaggcgttcatccttgccctcctggctgaggacagttgtgttttctgattcaggcggtctctgtccggcagcgcatccccatatacttataaccatgaccacggcgccaagcagtgccatgagccacgtaatccccctgtatcccacgggcattctgtcactcaattccattcacatcctttatatactgaacaacccgggacggatggtccgcaataagcgccggatgaaaggccataagttcttccctggtccgaaatccccaggtcacgcccactgtatccacctttgcattgtccccggtctccatgtccgtgttggtgtcccccagatagaggatttcactctttgaaagtcccagttcctccgctatggcccatacgccgtcagggcagggctttttcctgattcccttatcctccctctcgccgtagaccagattaaaatagccttttccaaacacgccctccacattgtccagggtcctgggatgtggcttgttggacagcacggcaatcaaaatgccctgtgactttaagaactccaaaagctccctgataccctcgtatgcctccacacggtacatgcagcatttccggaatatatcctgataccgatccaccgcttcatcataatgggccagctccttatccccgcaggcaataagggaccgctccagcagcttcttataaccgtctcccacatagagccggctctcctccacactgatttcacgcatgttccaataactcagggtatcattcacagacttctggatggcatagatagaatttacaagggtcccgtccaggtcgaatatacagcatttatacattatggttaccattcctttccatggatatacgtaaatctgtcttgacacaacctacatcatagcacagttccttctgtttttccactgcatttgacaccgcacccctgacatgctatacttttttcaacacaagacagctaaattttcccacattagaaggagcaaaccatgacgaattcctatatgattacctgctgttccacagccgatctgccggcgtcttatctgacggagagaggcatcccctactcctgctttcatttccgtatgaacggcatggaatatgacgacgacctgggaaagtccatttccattgagaatttttacgagaacatcagacagggcgccatgcccaccacgtcccaggtgaacccggaacaatacgaagccatgtttgagcccatattaaaagaaggaagggatatcatccatatgactctctcctccggcatatcgggcacctataattcggcggtcattgccagggatgagatgctggagcgttatccggaccggcggattgccgtcattgactcctgctgcgcatccgcgggctacggacttctggtggacacggcctgggagaagatgcaggcaggtgcggaatacgaagaacttgtgttctggattgaggagaataaaaaaagagtccatcattggttcttcacctctgatttgacccatttaagacggggcggacgcatctctgcctcagctgccttctttggcaatatgctcaacatatgtcccctgatgaatgtgaatgtggagggcaaactgattccccgtgacaagtaccggggcaagaagcgcgtgatccgcgaaatggtggagcggatgaaggaacacgcacaacagggcactgcctataacggcaaatgcttcctgtcccaatcttcctgtcccgaggatgccggtgcagtggccggcctggtggaggaaaccttcccccaattaaacggaaaggttttcatcgtggatatcggcactgtcattggttcccataccggtcccggcaccgtctgcctggttttctggggagatgaaaggaccgtgtagcttgcgtctgaaaatcactttctgacacgctcgcattaagccttctgttctttcatggacatcacatacaaggctccgaaaccggcagctccggccgcaagacttgccgccaggtccacgcccgcgggaatgccgggaaaaagttcaggcagggaaccgaacatgaatcccaggattatcagataggtgggctggggatgacgggacatcagccgctccagcacctttgtggtcaggaaaatgccgcccagcacgccggctcccagcggtatcaggggaaggatgttcagggagctgatatttcctatgatggtctcatagattcccagcatgtagagcatctgtgacacgctgattccgggcaggaccagccccaccgctatgatgaatccccctgccagctgaaggaccagggcgccgggcccgaaacttccgtccggtgtaaaaatccccgggggaatcagggccaggagcaccacccccaggatgcctatgacagggtaggcaaccgcccccaggtccagctttttcacgcctgcttccctgtatatcatgggaacacctccggccactgctcccaggaagaaaaaccggagaggcacatcggccctggtggtgaacagatagctgatgaagcgcgagaacagcaccattccgattcctgctcccaggacgaatttgagcaggaaggccatgctttctgcaggttccttaaaaaaagagctgatggatgaaataagcctgtcatagacccccataatcatggccatggaacctccgcttactccgggaaccgtcatggttcccccaatccacattccttttaatatgatattcatattgtcacgattcattggatatactccttttcaccttctgtagccttactgcacacgcgccccttccgggacagcagtaacgatattctaccccatgcagcaggaaaagtgaattaattttctgtatatatttatgaccggatacggcttattattgccccggacatgaaaataatcccggagtacaggctggcacacctttctccgggatttattttttgaggaatatgattatgtaataatacgcttaattaatgccgcactgggaatttcccggcatcatgctgacacccatctgtgacagcatggaattcaggtcctggccgcccttctggtactgtactgcctggggacaatttcccgcattgtaaagcgctgcattgcagtcatttatatttgccatattggtgccgcatgcagagcccagcattgcagcaagtgccatagatgaaactgataacatagtatgtcctcgctttctttattacagatgttacaaatctgtttcttttttgttacaaaactatattatcacattttaggcgctctgtgtctgggagttattggaaaaactacgatctttgtcttttttgcggatttttcatgaccttggtaatattttcctatccctcatccggggaccatttccacaaggcggaggatgagcttgccatcatacaaattctctgtctgccacattacccgtcagctgaaacagctggggcagatggttcctcaggtggatggggattcccgtgtaagtccgtgaaaacagaggagcttcccggcgctctaagcgccaaagatctgctccgcataatttacagatgccatggcatccctgcaataggcgtcagcgcctatggtcctggcataatcctctgtcagcacagcgcctcccaccatcaccttcacggtggcggacgcggctcttaactggcggatggtttcctccatgctgggcacggtggtggtcatgagggcgctcaggcccaccagggcaacctggcgctccacggcctcctttacaatggcctccggaggcacgtcccttcccaggtcgatgacctcataactgtaattttccagcagaaccttcacgatattcttgccgatatcatggatgtcacctttcaccgtcgccaggatgatggtccctttcttttcctgggtctgtccgcttccatccatagctgccttgatgacctcaaatgcagccttggcagcctccgcgctcataagaagctggggcaggaacacggtgcccttctcaaatccttttcccacacggtccagggccggtatcatctcactgttgatgatatctaacggttcccgctcctttaacagtgcgctcaccgcgttgtgggctgcttccttaaggcctctctcaatggctgctgacagggccggcccctggctttccccggcctctcctgacccggattgatggtctgcctttgtcccgtcctggctgccgccccttccgatggtctggcccaggcccgcgctctggccgctgtacacactgatatactggccgcactggggatcccggtccataagcgcgttaaagctgtagtaagcacgcatcatggcctcggagttggggtttatgatggcggctcccagcccgcattccattgccatggtaaagaacgcggcattgatgatttccctctggggcagtccgaaggatatgttggatacccccagcacggttcccactcccagctcgtcccggatacgccgcagcgtctccagggtggtaagggcccccctgctgtcggaactgaccgtcatgcagagtccgtccagaatgatatcctccggtccgattccgtactccgctgcccggtctatgattttccttcccacggccagacgtccctctgccgtatcaggaataccggactcgtccagacagagtcccactgccaccccgccgtattttgccatcagcggaaagacgcgggtcatggactcttccttgccgttgacagagttaatcagcggtttcccgttgtagatgcgcatggcccgttccatggcttccatgtccgaggtgtcgatttgaaggggcaggtcgatgatggcctgaagctcccttacagcctcctccatcatggatggctcgtggatttcaggtagtcccacgttcacatccagcacatccgctccgttgtcctgctggctgacgccctctttcaggatatattccagattgtggtcccgcagggcctgcttgaatttggacttgccggtggggtttatgcgctccccgatgatgattgtcttaccgcccacagtcactgcctttgcataggaggacaccacggtgcggtgttttttctccggccacaccacaggcatgtccttacaccgctgcgtcatcaggcgtatatgctccggggtggtgccgcagcaccctcccactaccacggcgcccatggacacaatctcctccatgacaagggcaaagccctcagcgtctatatcgtacaccgtctttccgttttcgcttctcggaaggcccgcattggggtttaccagcacaggaagggaggataccctcagaatttcctccaggattcccttcatctgcacaggccccaggccgcagttgattcccagtgcatccaccctcagtccctccagcagggccacggtggactccacgtttccgccggtcagaagctttcccttttcatcaaatatgacggttgcgaacacaggcaggcgttcccctgtatccggcctgaatccggcctccctggcagccagcaccgcggccttcagctcatagctgtcgctcatggtttcaatcaggaccaggtccgctcccgccctggcgcctatggacaccacctctttataaagcttcaccgcggcctcaaattccaggtcccccagaggtttgagaagccgtcccgtagggcccaggtccagagccacgtatccgtggcctgcctccttaaccgcggtcctggcgttctccaccgcggctgtcacgatgggttccagatcctccttaaatttaagcccgttggcgccaaatgtattggtggtcatgatgtccgcgccggcctccagataggaccggtgtatggatatgagcacatccctgtgggtcaggttccaccgctcaggaagctctcccggtttcaggccccgggcctggagcaggcttcccattccgccgtcgcagaacaggcggcgcaatttcatctcttctaatattctcatggtcattctccgcaagtcctcttaactgttcaaaatgtcgtttaccaggatgtccacctgttccccgctggtaatccagctggtgcagaggcggatagccgtatgactttcatccacccttccctggttggtgtaactgtacttgtccttccacgactccagcagggaatccggcatgatgggaaatacctggtttgtggtgttttccaccaggaaggggtatccctttttggcacaggcgcagcggatcttgtctgccagcctgtccgcgtgggctcccagctcaaaatacaggccgtcccgtaaaagctctccaaactgtatgcccagaagacgtcccttggccagcataccgccccgctgcttgatatggtagcggaaatccgccttcagctcgtcgttcaatatgaccacagcctccccgaaaagcgcccccgccttggttccgccgatatagaatacgtcacatgccgccgccagggacttaaggtccaggtcattcccctctgcagccaggccgtatgccagacgggcgccgtccacaaacaggtacagcccgtactttctgcacacctcatacaggttctccatctcagacctggtataaatagtgcccagctccgtggggttggagatgtataccatctttggctgcaccgtgtgctcaaagctttcgtcccggatatgggcctggtacagctcctccacctgctccgcagtaatcttgccgtcctcagagggcagggccagcaccttgtgaccggcggcctctatggagcctgtctcatgtacattgatgtgagccgtcacagcacccgccactccctgatgggaacgcagggcagacgcaatgactgtcatattggcctgggtgcctcccaccaggaaatggaccgctgcgtcctcctggccgcagaggctgcggatgatgcccgcggcctctgcgcagtaatggtcctccccgtatccgggagtctgctccaggttagtctcagccagtttcctgagtatgcgctcatgggcgccttcgcagtaatcacagttaaaacgaatcataatataattcccctttttattttatttttataccgccgccttaaggggctgtcccttgttatctccggtaggggcagtccgtcttggcacaggcttcacagccttttacgtcacaacggtatggtttcctgctggctcccatgaccgcggaaacagatttggagggcaacatgagaagactgtccgtcagcttgatgccgatgcgctttcccgcctccagggcctccagaagcattccctggcattccagcggaaaatccccgtaaccggggctgaacctggggcgcagataccggcctttcgcttcatattccgactttatcacggtacacacctgatcgcagtactcctcaatcatggccgctgccgctgcctgcatgaccacggcccggctcatctggagacggctgtacttctgaatcagatggtcggccccgcagccaagggtggccgcaaacacgattatctggtcacagtccttcagatttccccacaagttcctgctcctggccttgaaacaccccccgtcaatcctgtaatcctctcccagagacagaggatattcccggtacagatgcctgggcgtggcggcctcccataattccgccatggactgctccaccatggccgtcactgcctcgtccgcctcctgccccctgtatcccagatagcggaggacctccctcctgtctacgtcatgtatgtccatatgttcattctcccgatgtttttctcccgatgttttttctcctgagattcattctcccgctctgtatccggccctataaaatctccctataaaatctccgacaggttttcctttatcttcatggccacatccggcttattcatggaatatacatggatgccgttgaccccgttggcaatcaggtcaatgatctggtccgtggcataggctattccggcctgcttcatggccgccggattgtccccgaaccggtccacaatggacataaacctggatggcaggcaggtccccgacatctgggtaatccgccgtatctgttttgcgttggtaacaggcatgataccggcaatcacaggcacctggattcccttttcacgaatgcggtacaggtaactgtaaaggatgctgttgtcaaaaaacatctgggtggtgacaaaatcgcatccggcctccaccttctgcttcaggtaatccatgtccacagacttgttggctgattccacgtggccctccgggtaacatgcagccccgatgcagaaatcacctgccttcttgatttcccgtatcagctcggaggcatagtggtattcctttggcgtactgccatcctggggaatatccccccgcagggcaagtacattttcaataccgcgctcctttaactcgcccagtacatggtgcactttttccctggtggatgacacacaggtcagatgcgccagaggcgtcactccgtactcctccttgatggcagaggcgattcccaccgtataatcgctggttccccctcctgccccgtatgtaacgctcataaacgacggcttcagctttgcaatctttgcggccgccttttccacggaatcatatgcatcctctgtctttgggggaaacacctcaaaggagagggtgggctttcctactgccagtatctcacgtattttcaatcttctttcccttccttctgcgtcatccaaaaaagctccggcaccccaataatcaggattgccggagcaagcatttacatttctacggtcactttcttcagatgccagatatccttcacatactcctcaatggtgcggtcagatgtgaactttccgcagttggccatgttaaggatggctgccttagcccaccatgcctggtccctgtaagccttatccaccctctggtgcgcctcggcataggaacggaagtccttgaggataaagtaagtgtcagcccggtcgctgctcttggtgttcagaagagagttgtagatatccctgaacagctctgggttatccggcgcatagtagccgttaatcagctgcataagcacacggcgtatttcctggtcattgttaaagatatccatggggtaatagccgccgttgttctcgtagttaatgacctcgtcggaggacataccgaagataaaggcattgtccgcacccacttcctccacgatttccacatttgccccgtccatggttcccagggtaagggctccgttgagcataaacttcatgttgctggtaccggatgcctccttgctggccgtggatatctgctcgctgacatcggctgccgcaaatataagctctgcgttggatacgcggtaatcctcgatgaacactaccttaatcttgccgttaatggacttgtcattgttgatgacatccgccacggaattgatgagcttgatggtcagcttagcccgcttgtagcctgcggctgcctttgcgccgaagataaaggttctgggaatcatatccatatccggattatccttcagctggttgtacagatacatcacatggagaatattcatcagctggcgcttatactcgtgaagccgcttgacctgcacgtcgaaaatggagcgcggatccacgtcaatgccgttattctccttgatgtatctggcaagacgcagcttattctggtacttgatgttcataaactcaaactggcacttctcatcctctgcaaagagttccagcttcttgatatggggaaggtcggttatccactcatctccaatcttggaggtgacccagtctgccagaagcgggttgccgtgaagcaggaaccgtctctgggttattccgttggtcttgttgttgaacttctccggcatcatctcatagaagtcttttaactcctggtgcttaaggatttccgtgtgaagcctcgcaacgccgttgacggaaaagctggctgcaattgccatgtaagccatcttcacctggccgtcgtagataatggacattttgcgcagcttttcctggttgcccggatacatggtctgtatctggttctggaacctgcggttgatttcctccacaatctggtagattctgggcagaagccgtgagaacagctcgatgggccacttctccagcgcctctgacatgatggtgtggtttgtataagcgcaggtcttggtggttacctcccacgcctcatcccatgtgagtccctcctcgtccagaagaatccgcatcaattcagggatggcaaccgtcgggtgggtgtcgttcagctggaacactaccttttcatagaattttctgatgtcatcgtgcttctctttatactttctcaccgccctctgtacgctggcggagataaagaaatactgctgcttcagacgcagttccttgcccgcgtagtggttgtcgttggggtaaaggacctccacaatggtcttggccaggttctcctgctccacggccttctggtagtctcccctgtcaaaggaatccagattaaaggtgttgatgggttccgcgtcccagatacgtagggtattcaccacattattgccgtatccgatgaccggcaggtcgtagggcaccgcgcggacagactggtatccgtcctgtacgaaatggttcactccgccctggttctcaatgcgcacaaagcccccgaacttaacctcggctgcatactccggcctgcggatttcaaaggggttgccgtccttcaaccagttatccggcacctctacctggtaaccgttctcaatcttctgcttgaacatgccgtagcggtaacggataccgcagccgtaggccggataacccagggttgccagcgaatccaggaagcaggccgccagacgtcccaggcctccgtttcccagggcagcgtccggctcctgatcctcaatcacatctaaatcaaagcccatctcatccagggtttccttaatctcatccctggcgcagatattgatgatgttattgcccagggcacggcccatgaggaactccatggacaggtagtatactgtcttaacatcctttttctcatattccttgtgagtggcaatccactcgtcaatgatgacatccttcacagcataggccactgcctggaatacctgatggggggtcgcttcatcaatggtccttcggaacatattctttacgttgtccaccacgctgcgcttgaaggtttccttatcaaatcctttattcatcggccattatcctcctgctttcagttccgcttttatacagaactattgtatgtaaatcattcccaaattatcagacggggcggggttttatacgccccgcctcacaatcttaccattatttcatggtcttttcaacaccgagcattacattttcgccgttaatgttccactctttgacaaagccggacatggctccaatgctgatatggtctgccatgacctctgttttgatctcgtccgcatgctccttaatcaacccggcaatccggtcatttccatcctggaatacactgatatggtccatgacctcaaatccggcctccttgcgcatggtctgaatcttgcttatgagctccctcacaaagccctcctcaatcagttcgggcgtcaggttggtatccagcacaacggtcacatagttgtcttcctctgtcacataaccgtccttctgggatacatcgatcagcaggtcgtcctttgtcagcaccacttcctggccgtcatagtcaaaggtaagctgtcccttttcattcagggtgtccatggcggcgctgccgtcaatatcggtcagggtactccggatccggtttaacagcttgccgtactttggtcccactgtctttaactggggcttgaaggtataggaggtgaattcccttacatcgtctgagaaaatcacctgcttcacattcagctcttcctcgataatctgcacatagaaccttgacagctcgtggtcagccttcacatacatccgggcaatgggctgtcggttcttgatgttggccgcattcctggccgcacgtcccatgacaaccaccttaagcacttcatccatgtcggattccagctcagtatcaatccaggactcattcacccccgggaagtcgcacagatgtacgctttcaggcgcgtttccatccacctttctcacgatattctggtaaatctgctctgtcatgaacggaatcatgggagctgccgcctttgccacggtcacaagggccgtgtacagggtcatgaaggcattagtcttatcctgctccattccctttgcccagaagcgctcacggcttctgcgcacataccagttgcttaaatcatccacgaactcctggagggctctggcagcctcaggaatctggtaattcatcagactgttatccactgtctttaccatggaattcatcttggacaacatccagcggtccatgacgggaagcttgtcgtattccagggtatatctggtggggtcaaaattgtcaatattggcatacagcacccagaatgcataggtattccaaagggtacccatgaatttgcgctgtccctcggtcactgccttatcctgatagcgcttaggaagccagggcgcgctgcaggtgtagaagaaccagcggatggcgtccgcgccgtgggctgccagggtatcgaagggatccaccgcattgcccttggacttgctcatcttctgtccgttttcatccagcacaagccccatgacaactacattttcataaggcgccttgttgaacagcagggtggactccgcaagaagggaatagaaccatcctctggtctggtccactgcctcggagatgaactgggccgggaactgtgactcgaacagctccttgttctcaaaggggtaatggtgctgcgcaaacggcatggcgccggagtcaaaccagcagtcaatcacctcaggcacacgcttcattggcttctggcacttgggacacctgatgtttaccgcgtcaatgtatggacggtgaagctcaatttcatcagggcagttatcggataagctttttaattcctcaatgcttccgatggaatgctggtgtccgcactcacactcccagatattgagcggggtgccccagtagcggtttctggaaatgccccagtcctggatattctccagccagtcaccgaaccggcccttgccgatggaatccggaatccagttaatggcattgttgttgcggattaagtcatccttcacggcagtcattttgatgaaccaggactctcttgcatagtaaatgagaggggtcccgcagcgccagcagtggggatagctgtgctcaaagctgggagccgaaaaaagcagccccctggacttaaggtcctttaacaccatggggtccgcatccttcacaaaggtgcctgcaaaaggagtttccgccgtcatatcgcccttggcgtccaccagctgtacaaagggaaggtcgtatttgcggccaacgttggcatcatcctcaccaaatgcaggtgcaatgtgtacgatgccggtaccgtctgtcagtgttacatagtcagcgcagaccacgtagtaggcttttttgtgctgcttctcgcacaggggcacggagcagtcatagaggggctcatattccttgaactccaggtccttgcccttgtaagtctccaatacctcatagtccccgcccagcacggtatctgccagggcctgggcgatatagtaggtatagccgtcgcctgtctttacctttacatagtcttctttagggttcacgcacagggccaggttgctgggaagggtccacggcgtggtggtccatgccaggatatatgcatcttctccctttgccttgaagcgggcaatggcggaacgctcctttacatccttataaccctgagccacctcatgggaggacagcggggtgccgcagcgcgggcagtagggaaccaccttaaagcccttgtacaaaaggcccttgtcccaaatctgcttaagagcccaccactcggactcgataaagctgttgtcatatgttacatagggattgtccatatcggcccagaatccaacggtgttggagaaatcctcccacatgcccttgtacttccagacgctttccttacattccttaatgaacggctccagaccgtactgctcaatctgctctttgccgtccagtcccagcttcttctcaacctccagctccacaggcaggccgtgtgtgtcccatccggcctttctcggcaccatatatcccttcatggcccggtatctgggaatcatatccttgattacacgggtctccacatggccgatatgaggcttgccgttggcagttggcggtccgtcataaaatacataaggcctgcagccctccctcatcttgatgctcttttcaaagatgtgctctgcttcccagaatttctccacttctttttcccgttccacaaacttaaggtctgtggggactttgtcatacataacgtcttcctccgttccattcatgatagatttctattctggtatgtgaaaaagattgtatatccttccatgaagcaaaaaaggcttccgtcccgaacaggacgaaagccgtaagccgcttcgtttaaccacctattactgcataccatcatatgagttcccttaacgcgggaaacgcgtcccggcctatcatgcgctgctgacgcatcccttcagccggacagctccggagtgattttcagttctgcattacttacaccggttcccaccatctccggctctctgtagcgttcctgcaggcctactgtctccatctaagccttttccatttaacctctttattataataacccgcacgtaaaatgtcaaccgtgtatctgattttcgtttggattgttaatattttatcatttcgtttgccttttccagaatatgtgttatactactaaccaatattactgcacagccgtcaatatcctgccgcaccgcatactctgcgtacagcacaccggctgcgcccagggaggaacctatatggagcagagaaatcttaccttactcacagacctgtatgagctaaccatgatgcagggatatttcaaagaaaaagatgccaatgaaaccgttgtattcgacatgttttacaggaccaatccccacggcaacggctttgccatctgtgcaggattacagcaggtcattgagtacattgaggacctgcattttgacgacagcgacattgaatacctgagaagcctggatatgtttgaggaggacttcctgagctatctccacgaattccgctttacaggcgatatctacgccattccggagggaaccgtggttttccccagggaacctcttgtcaaggttattgctcccatcatgcaggcccagctcatcgagacggcactgcttaacatcatcaatcaccagagcctcattgccaccaagacagagcgcatcgtctatgcggccaagggcgacggcgttatggaattcggactgcgcagggcccagggaccggatgccggcacctacggcgcaagggcagccatgatagccggatgcatcggcacctccaatgtgctctgcggaaaaatgttcgatgtcccggtaaagggaacccatgcccacagctggattatgagctttccggacgagctgaccgccttccgcacctatgccaagctctatccctccgcctgcatcctgctggtggatacctatgataccttaggttccggcatccccaatgccatccaggtatttaaggagatgagggaagccggtattcctcttaccttctatggcatacgtctggacagcggcgatttggcctacctgtccaaaaaggccaaaaagatgctgaacgaggccggattcccggacgcagtgatttccgcctccaacgacctggatgaaaacctgatcaactccctgaaaatgcagggcgccaccatcaattcctggggcgtgggcaccaacctgattacagccaaggactgcccgtccttcggtggcgtatacaaactggctgctgtcatggacaaggccaccggccaatttgtacccaaaatcaagctgtccgaaaacgccgagaaaataaccaatcccggcaacaaaaccatacagaggatttacgatagggccaccggcaaaatcatagcagatttgatttgtctggtgggcgaggaattcgacacccgcaattccctccttctctttgaccccttagagacatggaaaaagaccatgctggcacctgacagctataccatgcgggaactgatgattcccattttcctgaacggaagatgcatgtaccagtcgccgaaggtaatggatatccaggcctactgcaaaaaagagctggataccctgtgggatgaatccaagcgtctcatcaacccgcacacagtccatgtggacttgtccaatgagctgtggcacacaaaaaaccagctgctggattccttccacaggaaataaacaggccggaacgtgtaaaggccggaaccgcctcctctcaaattaggggatgcggtcccggccttcttatatctctccatccaccagaaggggaaggacattctgcggaaggtcgtatatgaccatatcggccttctcatccagcggcctgggtatccggtggataatgaccatctttctgccctggaaatatcgtatgtagttgctgtaaacctctgaccgcaggctggttcccagtaccaggagcacgtcggccctggctatctcctccgtggtgcggctcatgatactgctgtccaccatctccccgtagagagaggtaccgggacgtatcatagtcccgcagtccttacagcggggaacatggctggaatccctgatttcttccatggaatacaggcggctgcagtggggacacctgttcttgtaaatgcttccgtgaaggtaaatcacattcctgcagcccacctgttccggcaaatcaaaaatattggtggtgacaatacactgaagcttgccctcttcctccatcctggccagcgccctgacagacggagtcatgttgggaatctttttcagtatctcctcgcggtaaaattcatagaaacgttccggccttctggacagacaggaaatatgaaacagttcctccggtgattccgaatatttctgttcgatctcatatgcccgtccttcctgcttaagtcccagaatgcctccctcttccatcatcccggaaccgcagatggcaaccgtataactgctgtctgccagaatctgcttcaggagttccaatgttttttcgccaatcatacccgctcagtcctcctcttattctgattgttccagagcgtgtccaaaacccacacactctgacatcattataccgcaaatccccccgccttaccacaaggatccgcgggaactgtaagcgtcagccccgtaaatcacggcgttttatgtcgaaaaaacagaacacagctaaaccaggtcattgaaacagatggccccgtgggggcgaatgctcattctgtaggcgcttccctcccctgtacatttttcaatgtagtgtatgaattcgtccaccagctcattgggcagcactgccatgatgacgccggcaaagcctcctccgtgaatcctgcatgcccccctctgcttttctgctataaacagctccgtaagggccagggtaactgtgattccctgctcctggtaattgctgttggtaaagcagttctgaagccatttccaggaggaattgccggacgccgttatattggttaagaaatcttgaaaacggttctccttaagggcaagcacctctgcctccaccctcttattctcctcaaagaaatgcagggccctcagcacggatcggtccccggcaaattgccgtacctctgccaggttatctatcacctgttcctcggatacctgggacaatacctcttttccaaaataccgggccacctttttcatctcggcgggaaccgcggaataatccgcgcttaagtcagcgtggcccttgccggtctgtacaataatcaggctgtggtcttgggaaccaaagtcaaagtctatcttttccacctcaggtgtcagcggctccatgaaatcaatggtgataagaccgcccacggcacatgccatctggtccagcaggccggacgccttgtcccagtaattattttcagcgaacttgccgatatgggcataagccacggtgctcatgcggctttcattgaaaaatgtgttgagcatggagcacagcagcatctcaaaggaggcagacgagctgaccccggctgcgcttatgacattgctggtgatatatgcgttgaatcctcccacgctgtagccggaatccttaaatccctggagaaggccctttaccaggtccacggttcccgcttttttctcgctgggttccagatggttcagatcaatggtaaaatcctggttatatgtctcgctgacaatatgtacctggttggattcattctttccggccacgcccacacagtccaggttaatgctgcctgccagcaccttgccgtggttgtggtccgtgtgattgccgctgatttccgtcctgcccggcgaggagaacagcatcacatccccttccccgccaaacatcttctcatatccggccagcaaatcctcatagcgctttacattggcctctaccccgtcttccccgtagagctgcgccataagagtcctggcgccgtcactctccagcagctttaccgtctcgtttaccttcatgatttacctctcctatcttttctgaaacttctgaattcagtttatcacacccggggcagaaacaacaatacaatattctcctgtctttatactttttttaaatggggatgacatagggcaggctttgctgttataatctcttaaacagtatcatgtaagaaagcaggtattcacaatggaatggaacggaaaaccctatcactctctggactatgagctgaggcagcagttcggccaaaaaatctataagctgtccctggacggaggcatgacctgtccaaaccgggacggtaccctgggaacagggggctgtatcttctgcagcgaaggcggctccggtgattttgccgctcccagacagacggctgtctcccggcagatagagcaggccatggcacaggtaaagaggaagatgccggacggctcacagggttcatatattgcctatttccagtcctacaccaatacgtacgctcccctgccctatctgaagcaattgtttggggaagcagtctcccatcccgccatagccgccctgtccatcggcaccaggcccgactgtctggagcctgaggtcgcgggcctgttaaaggatttaaaccgcgtgaaaccggtatgggtggagctgggtctccagaccatccatgattccacctccgcctttatccgccggggctatggactgccggtgtttgaggacgccctcagacgccttaaggcagccggcctgaccgtcatcgtccatgtcatattaggcctgcccggcgagaccagggacatgatggcggaaaccgtgaattatctggcccaatgtcctatagacggaatcaaactccagcttctccacattttaaaagggaccggtctggcagattacttccaggccaatccctttcccatattcacaatggaggaatacattgattttgttatagactgtgtggaatgcctgccccctgaactgaccattcaccgcctgacaggggacggtccaaaatcccttctcctggctcctctgtggagcggaagcaaacggctggtgttaaacaccctccaccgccgttttaaggagagaaatacctggcagggaaaatattatatcccggattcctcctgctctgccgcgttttcctcccccggcgccacaattccgtcctccccaactgtcacgccgtaggaaatggatgtgatatactgataaaaacctgctttttcgccttcatctgtcagcatcctggtatatcctcctgaggatgtgccgggcaccagcctaagcagcgcgtcctccccatcccattccaccttcagaagggccgtcttcggaatactgctgccgaacacaaaattaccaaggctgtatacaatgggctttcccttgtaatattccagcccctgcatcacatggggatggctccctaccacaaggtcagcccctgcatctatatactgctgtcccagaattctctggtactcctgtggccgttcgtcacgttcaatcccccagtgcacatatatcacaaggtaatcgcaggcttccctggcctttttgatctcctccaaaagctgggacgggtcataagtggtaagcatgcccggtcccttggaagtagcgttccaggagtcctccggtatgactctggaagcgcccaggaagccgattttgcggccctttgcctccatgaataccgttttttttgcctcctccagattggctccggctcccacccgcaggattccggcatcatccagagtgctgcatgtatccagcaaggcatccgtaccgaaatccagggcatgattgtttgccagtgtcacgatatcaatccccagctcctgaaacatggataccttttccgggggaagccggaaggtaaactgcttatccgcagcagccgtgccgcgtctgctgaatggaaattcctcatttgccatgaaaatgtcgctggtgtcaatcacctggcggaatccgctgtccaccactccccctatattgccggccttctggtatgcgttcagcacatggtctgacaggaggatatcacccgcaaatacgaattgcagaggcgggtccttatcctctgttcctgtttcagggtcctgttctttaacgccatttggagcatccgataggccgccatccgctgcatccgggccgtctgttccttgaacgctgtccggatttgcgacgccgcctgctccgcctgtttcctcctggaccggctcctctgcgccggcaatgcccacaccttccgaggcgcctgccatctcagccctgacatatttgtcctgtcctgagtgccatataaaatatcccgtaataccggccagcagcagccctaataataaggctgctgccacaatacatcctgttctcttcataaaacctctcctgacagacatcagactgccaatacaatccctccgtcattggcatatacagtggccacgcctgccgcgttggtaaccacaatcttcttgaatcccacccttttagccagctcattctttacgtattcagcccgttcagggttattcacatggcagacaaccgcaatcttgccggccgcgtccaccacttcctttaccgcaatgtcgcacattctatgaagcgccttgttcattcccctggcctggtccagcttgatgatggttcctgtatccgcgcccatgacaggcttgatgttaagggctgtggcgaaaaatgcctgcaggcctgacagacgcccgttcttgcggagcgtatccaggctctccagcacaaaataagtattcatgccgtccctgtatgccagggttttctccaccacctcatcaaattccagtcctgaatcgcacaggttctggataaagagggcgatgttaagctctcctgaggacgcggaaagtgagtcaatgacagccactttctttgcctgttccgccatccccttttctgccatttcctcctcatacagcttctttgccactgccgctgaattatagcttccgctgaggtggctggacagggtgatgacaaacaccgcttccgcatccgcttccgcaaatgcagccttaaaagtctccggcgacggacacgctgtctttgggcactccgggcacgcctttaccatctctataaaccgcttctggtcaaatgtctcatcatccactacctgggcactgcctacctgcagtgtcagcggtatcatctgaaatctgggatccttcttcatatcctctgtcaaatcgagacaactatccccgataatcttataggtcataattatgtcctccggtttttcttatccatgtgttttcacatgtagtattcattactacttattataacagtatggatggtaaaatgcaatgcttatgtgtttccagttttatggagttttttggggagtttttttggcagaggaggacgaggacggtggttgtgtccgttcgtgggaacgggtgagcgggggaggcatggacgggctgcggggcaagaaggtctaaggccctgtagatgcccgtcccccgcccgcccgtcccttccccgcccacccgctccctcccatgaggttttctccgtccggtggctggtgttggtgtgattatttgtgtgaaatttcagacacactctagtgcacctgctctatagctgatagtatctggtctatggtggcttggcggtcgccggtgtattcgatggagatttccatgagcttgccgtctatctggcggaagtaggtgtcctcgtgttctgtggtgccgtcgctgttttggccggaggtctttacatacttgtattcatagccgcccatgtttactgtgcctgtgctgtcaacggcgtaatcatagtagcccgcatattcgatgagccattccaggtaacggtccagctgctgggtggaatcggtgtagtctacggtgaacagatagccggttccgccgtcgtaccagtagtacatattctcgccggcctccaggggatagctgtagtagcttccgtcgcccagcatcagttctgccgcctcagggaacttcataaacagattggcccagcggttgctgtaggtctttcctgatatggcgcctgtctcataggccgcggccggccgctcgcttccctctaccatgtaaccctgggcatcaaaggtgtattggctgccgtctatggtcttggtcagattggtcaccatgtggccgaactcatccacgtatttccatcttccgttttcttcaatccaggctttgtacatgatttggccgctgccgtccagacggtatgtaaggccgttctcgtccagagcccattcgttggtcccgtaggtgccgtctccgtggagatactgccagccgcctgcttccgtatagttccagccgcctcctgcgtacgggcgcatctgactcaagagcagggccgccgttcctgcctgatcaccggaatagatctggaccagcatgtagcagtttccgctaatctccctcatgtagacatccaggaacatgctggcggccagcttacccatataggcgtcatacttctgcctagcctccggggtcatgtcgtaactgcctatccaggcagacatatactgtgccatcagggctccgtaattgatcttgacagagtaataaccagcccctgctataccggccgtccccatggatacataggaaccataggatgcgtcctggcccagcagctgcagcatctcctgcattattccctccaggctctcaccttccaggtctgccacaatgccggtcatggcaaggaagctctcattctcctcgtcaatggcagaggcgatgaaatcaatcttcaccccgtcctcctccatataggacagatagtctaaccccaggtttcctccatatcttcccacctcataaccggctggaaatgtggcctcaaatccggccatgctgcttctcaccgtgcttccctcaatggaactgagccccgtgggaagcgcccaggctgtcattgcgcctgcggctgtaagcactgcgctcagcagcgctgacacgaaacgtttacctctcatacaactcctctcctttcttcatactagtaagatatttccagtataaccgatttagaatgtccgtgcaacgcaaaaagagaccggtttcaaaagtttcctcttgaaaccagtctcttattcttttgtaacgctcctgttacgattttatatgtttcgcagtattattccgctttttcggattctgtttttccgccggccataatcatcatgatttcattgctgcggcttacaaatgccgtcatgcgatccggagccagagggccgtggcttaagcttgccaggtcatacagctgttcgcagattttggatgtattggcatcatccttatgtcccaatacatactgcacaagaggatggtttgcgttgagcaccagtgtctcacctgttccaccgaacatacccatatccatgccgcccatgctgtacatcttcatcatatcctgcatacggcgggtgtcctcggacacggtaatcatggaagccacgcccgcattcttcatcttttcaaccttgatgtccagcttatcattgttcagggcttttttgaagcattccgtcagctcctcagatgttttcttgaactcctcgtcgtcttcctttacatcttccttgaacgcggcgttaaggtccgtatcaatacgcaggaacttgaggccttccttcttctgctccacatgtgagataaacgggctgtctatggcagcgggcatgatgacagcgtcgattccctcttccttaaacatgttgatgtactggctctgttccttttcattggtcacatagaaaatagtattctcatgcttttccttgttctcatccagacagtcctgaagagtcaggtatttgccttccaggttcttgtacaggataaagtctcccatcttctcagcaaacttctcatccttgatatagccgaacttgatgaagggcgcaatgtcgtcccagtatttctcataattttccctgtctgtcttgcacataccggaaagcttgtctgctaccttcttcgtgatgtaatcagatatcttcttcacgaagccatcattctgcagggcgcttctggatacgttaagaggcagatccgggcagtcgataacgccctttaaaagcatcaggaactcaggaattacttccttaatgttatccgcaataaaaacctggctgttgtacagcttgatggttccctccaggctgtcgtactccatgttgattttcgggaagtacaggatgcccttcaaattaaatggataatccatgttcaggtgtatccagaacagaggctccttgtaatccctgaacaccttgcggtagaagctcttataatcctcctcgctgcactcattgggatgcctgttccacagagggttggtgtcatttaaggccaccggacgcttgttgattttatatttttccctggaaggctcgatttccacgacttccttggtaccgtcttctttttccttttcctcggttttggccggctcaatgacggtctcgaccactgtatccttgccggtgagctcgtccttctcaatggtctcatactggggctcggctgtctcattgtccaggaaaatgttcacaggcatgaatgcacagtacttctcaatgacttcccttgccctgtactcgttgcagaactcggtgctgtcctcgttcagatataaggtgatggtggtacccacctcagccttatccccttcctccatctcaaagtcaatgccgccctctgattcccagtggaccggcttggcatccttctggtaggacagggaatcaatggataccttgtcggcaaccatgaacgcagagtagaagcccaggccgaaatgaccgataatctggtcctcattggctttgtccttgtacttctccatgaaatcctggacgccggagaatgcaatctggttaatgtacttgtcaatctcatcctcggtcatgccaagtccgttgtctgtgatcttgatggtcttgtcatttgggttcacggacacctggattttgtactccaaatcctccggtctttcatactcgcccatgagttccagcttcttaagcttggtaatggcatcgctgccgttgctgatcagctccctgtagaaaatgtcatggtcagagtacagccatttcttgattaccgggaaaatattctcgcttgtaattgataaactgcctttctttgccatctttcatccgcctctttcttatataataattagttcttcatgttttgcaatgtttactcacaaactacattttagtacgagacgaataaaatgtcaataaaaaattagcactcatttttgttgagtgctaataatcaggggtggggactccaaatccaggttacagttcctctttgagaagtttggtgtattgttcaacgattcgataaaaggcctctaaatcagcctcgctgcattgttcgataagataggctgtagtttgtgtaatatctgcaatatcatatgctttgtgaacactggaaagccgttttcctttttcggtcacatataaacgggccgttttttcattgttttccatataacgcttttctacatatccggattcgattagctttttgatggtctgtgatatggcactcttgcttttgtgccaaattttagataactgggtagctgtaataccgggacaatcatcaataaaggtaagagtgtgtatttgcatcatattgcaattttcagcctcataggtgtgttttccatagatataattgtgatataaaattacaaactcatacagcatattggccctagcggttatcttgcggtatgcattgtcaatgtctgtaaagttggtcatataaactccttttattcttacatattcatactatttaagacattatcaataatatcatatttaaaattatgttgcaagattttaaaacaacaccactttacaacttttattaataattgaaccgctgctgattaagccgtttcaaagcatttgaaacagctctgcgtgtcccaagtaataactaccaatcttctcgttggaaagtgtaaaatcgacctctggtgaaagacgttttccatgttttgccggtcttcctcttttccctgttggctcaggggcaagatcatacatgacagagtcaaaccttgcattgcagctcacatccagattgggatattcatccacaatggagagcagacctttctctgtataccagctgtctcagaggataatcacatttttcatggaagaaaaggcaggcatcacctggcgtaccatagatgccgcaagctttagcttggatactctttttgccacatacggtatccgagagggacagaaagatagaccatcctattgccgttccaaacaggagcgaaaaagcatcagaacgtcctgtacgatattttacggtgtccaatgcaagccattctcttaaaatagttaattaacaaaacaatattaaatcaaaactaggttttctatgtgtaaaacagcgaattatcaacttatataacttgatatattgacaataagcacaatatataatataatattgttcagtttcgaaactatattatatgtgtcagaaaggtggtatctggatggactttgaaaagttctgtagagaaaattgtgttgagcgaaggggcaccggcactttaaagtgggactcactgcaggaaatcttcggagatgctgatttgcttccgttatgggtcgctgatatggagattcaatcgccggcagcagtccgtgaggcactgacaaagcgtgtggaacacggtgtgtttggctatggtaaagtagaagattcctattatgatgcattttttgcatggcaaaagaaacatcatggtatagatttggtcaaagaaaatgtacggtttgccacaggcgtggtaggctcactgtatgctgcaataagagcatatactaaggaaaatgcatccataataatctgccctcctgtatattatccattctatgatgcaatactgaacaccggaagaaagctggtaacatgtgacctggataataacaagggccattacagcctcaatcttgacaagttcgaaaaagaaatatcagataacaatgcagagatgttcatactgtgttcaccgcataaccctgtgtgccgcgtatggtcagaagaagaactgaatgctatgttagatatctgccacagacacgaagtgctggtagtatcagatgagattcaccaggattttacatatggagaaattcctttcatatcttcagctattgttaagggcggaaaatatagggatatgctgattatcctaaattccggatctaaaactttcaacttagccggtttaattcactctcatgtgattatttacgacaggaagctgatggaaacctatgatgcctatataaagagtataggctctccggaagttaacttgttgggagttacaggtatggaagccgcatttcgtaatggcgaagagtggtttgaaaacgtaaaatcactgatttgtcataattataactatatgaaactggaacttgccaaggagcttcctgatgttgtggtgacacctcttgagggaacttacctttcatggcttgatttgcgcagctatgtgcctgaaaaagaaacagcaagctttatccagaataaatgccgtctggcttgtgatgtgggggaatggttcagctttacaggacatggttttatacgtattaaccttgcaacagatacaaaaaatatcaggactgctgtggagagtatcgttacaaacatcaaagcactatgattaccattttcgtatctgatagaaataacaacagtataattgaattgtaaaggaagtgaaaacatgggaaaacgtgtgctggttgtagggggagttgctggcggcgcctctgtggcagccagagttaggcgtctggatgcagatgcgtgcataaccatatttgagaaaggagagcatgtatccttctccaactgtgcccttccctactatttgagtagaactgtggaggataaagataatctcacactgatgacaccggaagactttaagacttcttacaatatcgatgtgcgaatcaacaatgaggtgtgcggtatagaccgtgtccgcagaaagattcaggtgaacaatcgaatcacgggtcagaaatatgaagaggcttatgatgaattggttctgtcacctggttccgcccctatttgccctaagctgattaaaggagtatctcttccacacgtattcactgtacgtaatgtaagcgatattgttaaactagatcgatatttaaaccgggagaacagctgcgatgtggttgtagttggcggaggctttattggtcttgaagtggcagagaaccttaaaaaggctggaaagaatgtttctgtagtagaagcagccggtcaggttatgaatccttttgattatgatatgagccaaatcctgcataaggaactctgtgataatgacgtggaattaattttaagagatggtataaaggctatcacagaagacaaggtaatcctaaactctgagagggaactgccggctgatgtagtagtacttgcaattggagtactgcctgagactacgcttgcgaaagaggccggactggaaattggtgaaacgggcgcaatcaaggttacagcagatttccgtaccagcgatccacatatttatgcagtgggagatgccattgaggtgtaccagagcctaacacacaagccagtcaggcttcctctggcaggaccggctttgcgccaggcgagggctgctgctgatgccatgtatggtatgcatgggattaataaaggggtgattggttcctgtgcagtcagaatttttgaacttaacgcagcagccacgggactaaatgaaaaaaatgcaaaggcgaataatataccttgcgattctgtttataccattgcaatggataaagtaggactaatgccaaatagttctcctatccattttaagctcgtatttgaagtgcctaccggaagaatcctgggcgctcaggccattggaaaaggtaatgtggacaaacggattgatgtcatcgccactttgattgctatgaacggtacactggaggatttaaaagaattggagctttgctattcccctttgtttggcacggcaagagatgtagtaaatctggctgcactggtaggtcttaacattctgcatggtgttttcaaacagatacatgtaggtgaggtcagaaacctagtagagagtggtgcctgtatcattgatgtaagaacccatgaggaatttgaaacaggccatcttattggtgcagtcaacatcccattgggagagataaggcagaggacttctgaaatcccacacaatcgtcccgtatatttacattgcaggaccagccagaggagctataatgctattatggcgttaaagggctgtggttttatcaacattttcaatatttccggatcgtttttgggaataagctattatgaatactttacagatataacgactggacggaaaaaaatacttacagaatataattttatgtaatggatgtatttatattgatgaagctgtaactgctaataactgtgtgggtacagaacattacattaaaaacgaaagaaaaggagtcaggggtatggaaaacgtattttttaagcagtttttaatgataagcgatataaagaccattgtttttctggcagttcttgtaggtctattctatttgattcatattttataccacaaaaaacatatggactttgcagtggtagttatggttggcacgggtcttggcttggcattaggcctggcaatccagtttgttgccaattttccagatgctccaatggatgttgcgttcgttgcagagacaacaacttggtttgcaatggtcggcaacggttatatcaaccttatcaagatgattgtagttccgcttgttatgatttcaatcatgcaggttattatcaacatgcagcagggtaaagccatgagccaactggtcaagaatactatcatcattactatgggcatggttttggttgcttctgtaactggcattgtgattggcatgctgtttggcattggtaagggagccaccttagttgaaggaggtgctgcaacagcaaaagaaatcactcctgtagctaccacaattaagaacctaattccaggaaatattgttggagctatggtagacagcaacatcattggtcttgttattttctctgcttttcttggtctggcaatctggtggataaattatgagagcaaggaggccgcaaaacccttgtatcatctgattaatgcggctcacaaagcgatgattaatatggctttgctgattcttgattatatgccatgggcagtcattgctttattggcaaataccatcgctcaaagaggtctgtcctctatccttgaggttggtaaattcatcatcgcactttacgttgcagcagccgtgcagtttacgatccaactaatcctgctggcagtgaatggtttgaatcctatgacttacgtaaagaaatcttacgcaacaatgttaatggcatttacctctcgttctagcgttggctgccttccaatgacgattgaaactctgactaagaaactgggggtaaaccaagggacggcaagctttgtggctggtttcggcacgactgcaggtatgcaagggtgtgcaggtatctttccatctctgttgattatctatgtatgtaacgtaactggaactccagtcgatattaccatgattgtaatgacaatcttcgttgtaaccatcggttcattaggtatcgcaggtattccaggtactgcaactatggcggcttccgtaggcctgtctggcgtgggtatgggtgcacagtttgcaatggtaagtccgattctggctatcgacccaattatcgacatgccaagaacaatgctcaatgtaacgggttctctgaccaatgcgcttgttgtagataaacatatggaaagtttgaatatgacagcttacaatgatatgagtctgaatcagcaggagaaaaggtcataagatgaagagttatggaaggtgattaaaaagacataggaatagtgtacttttaccctggagaagcttgattttgtaggttccataaggataccttcagatttgggatagcggtatagcatgacagtgttataccgctttaccatatatacattgacctttaagatggaatgagcgcaccgcagaggtaataaataagcccgtgaatatgcgatgcagctacatactcatggacttattcagttgtacaaatattcaattttcaatcatcatgtcaaggctcaattttacaccattttttacaccattttcccgtctggatacaacgggctataatgaattcctttttatgggagaaaatccctgattttcttgcttttggagggattgcgaagctttctgagagcagctgtctcaatctggcggatacgctccctggttacgttgaaccgttttcccacttcctccagggtcaggggatgtccggtctccaggccaaaacgcagaatgatgacatcacgctcccggggattcagcccctgaagcatgctgtcaatctcctcccgcaaaagaaagctctccgccttgtcctctgtggaagcattggtgtcgtccgccacaaaatcccccagattggagccctcctcgtcacctaccggtgtttccagggatacggtatcacccgatgcctgaatcagctccgtcacccgtttctcggacatgttcacttcctcagccacttcctccatggacggctcccgtcccagtttcacggacaggctgcgctgggcacggcggattttgttcaccgcctccaccatgtggaccggaagccggatggtcctggactggtccgccagggacctggtaatggactgcttcacccaccatgtggcataggtgctgagacggtaacctttggcatagtcaaacttctccactgctttcataagccccaggtttccctcctgaaccaggtccagaaaactcattcccctgccggtatatcgtttggcaatgcttaccaccaggcgcaggttggcctccaccagcctgcggcccgcttccacatcgccttctgacttgcgtcttgccaggtctgattcctcctctggtgtaagcagcggaatggagccgatttcttttaagtattcacggattggatcggctgtggatacaccttccagaagccgctcctggccatatccgtcgtagtcctcctcttcctcttcttcgcctccggaacctatactgcccccgtccagcatatcatcctggtccagtcggtctcttccccagcgtaaatcttccttaaccagggacagctgttccagctcggcatcatcgtctaaaagaaactccccctccggcaaatcttcttccggttcctcgggagcctgtatgtggacacctttgcgctccagcttcagatagacttcctccatctcctccggtgtcatctgaacatcccggaaatgatccagcacctgggtcatctccagacgtccttccttggaggccgcctcactgaccagctgccccactctcttagacaattccattttatccatatgttatcctcccccttctcctgggacatactaaatataggtactgtattgcgtaaatccctctttgaacagcggggcttacgcagcacagtaccgttattgagtctgcgggtacgttaggtacatattatttcatgggaacgcatgaactttgccaccgccttgtcccactcattttccagggccttgtccatggtaaaaaagttcagcgaagttcccgtcacacaatataatgctccgtcttcgtaacggatattcagataaagtccctgtatctgttcaccgcttataccgcttccggaagcggaagcgaatttttctgtgtccgaaggaggaagcagcaggacaatatggaagctccccggcagcttttttcctttaatcagcgaaaaacatacggggcggagcaccttccaggaggaaaaggactcaatccggttctcctccagctcctcgtctgtataatatccctgcctgatgtgtccgtcgatggtaaaattattataggtgacaatgttcacttccttaaccaggaagctgtcaaaatcttccttcaggaaaagtttggatgtaaatgtcttcacatcctctgcttttaatgcaatcatattattctcctgccctgggttacaccacaggtttccaaattcttactcaattatacagtttttgactattgacgtcaaatagaaactgtgtggatttttctgataatatcaggaagtgttttagcggttctttggcggcgcacggacggttttccggcggttttccggctgctgttttctgcggaatgcgtttgacaggattggtatgcggagggggaggttagtgtcaggatactctgatattgtccgatatgcactgatattatctgagatgctctaatatagtctgagatgctctgagataatctgaggtgttctgattgctttactctaacatattcttcctctttttcatagtgtctgaatatcgactatatctcatccagcggacttcgtttcagcacgaaatccatcattttcttggccgccttcccgtgatatctcagtctgtggtatgtgagataaatatatcttcccttatcaagccgctccgggcgtgccagcccgattcggtaaaggtccgctgcgctccttcaagatggacggttggcaccgtatgcatagagtcacgcaaggccgggaaggtaagcgagcttgccttcccggccttccatgcctctatgcgcactgcctgcagctaggccaggtttgtataccccatcatatccctgtctacggctttggcggcttcgcggccttcttgtatggcccatactaccagggactggcctctgtgcatgtcgccggctgtgaatatctgttgcgcactggtgcggtaggcgccgggttctgcagctacgttagtcctggcgtccagctctacgccgaaggcgtctgctacgtaggcttgggttcctgtgaagccggcggctatgagtaccaggtcggccggaatttcacgctcgctgccttccacggctgccatgacggtgcggccggtttcctcgtctttcctgggtaccaggtttgtgattatggccttgcataccttgccttccccgtcttttatgaattccttcactgtggtctggtactgccttggatctgagccaaacacgcttatggcctcctcctggccgtaatctgtcttgaggattctgggccattcaggccaggtattattctccgcccgctccacgggaggtttgggcatcatttccagttgggtgactgaggcgcagccgtgccggatggatgtgcctacacagtcatttccagtgtctccgcctccgattaccagcacatgcttatcctttgccgatatgcagcttccgtcctccagcccggaatccagcaggctcttggtggcggctttcagaaaatctactgcaaagtatatgcctgcgctgtccctgcccggcacatcaatatcccttgggttggaggccccgcaggccaggatgatgcggtcaaattccttccttattttgttgacccggtaattcctgcccacatccgctcccgtcacaaaggtgacgccttccttcttcatcacatccactttgcggtcaataacccatttttccagcttcatgttgggtattccgtacatcagcaggccgcccacacgatcgttccgctcaaatacagtgacactgtgcccccgtttattcaactggtccgcagcagccaggcccgcgggaccggatccgataaccgccacctttttgccggtgcggatggagggaggatttgggagggcatatccgctgtcgtatgccttttcgatgatggccctctcattttccttcacggtcaccgcatccccgtacaggctgcaggtacaggccgcctcgcagggggccgggcataccctggaggtgaactccgggaagctgttggttttcttaagacggttgtaggcctgtttccagttgccggtatacaccaggtcgttccattccggcaccaaattgtgcagcgggcatccgctgaccataccgccaatcgtcatgcctgactggcagaatggtacaccgcagtccatgcatctggccccctggcgtctctgttcctcctcacttaaggttgtgtgaaactcattccagtttttaatccgttcctcaggagcttcgccccttcccacttctctctcatattctaagaatcctgttgcttttcccatgattgttctgcctccttaacctcttaaattggcgtaaaatgcctcaatctgcgcctgttcgctgttcagtcccttttcctccatctgtacaatggcattcatcatgcgccggtaatcatggggaacaaccttcttgaacctgggcagatattcgctgaaacgctccaggatccgcctgcctttcagagagttggtgcaggccacatgttcttcaatcaggcccttcagttccagtacatcgtatttgttggtcacctcctcaaaggataccagctccttattgaggcgcttgtaaaagctgcggtcctcatccagcacataggcaatgccgccgctcatgccggccccgaagtttttgcccgtggttcccagcacaaccacgcagccgcctgtcatatattcacagccgtggtctcccacgccctccaccacggcggttgctcctgaatttcggacacagaagcgctcccccgcgattccgtttatgaacgcctttccgctggtagctccgtacagggccacattgccgattatgatattctcctcagccttaaaaagcacgcctttcgggggatacaccaccagcttgccgccggaaagtcccttgccgaaatagtcgttggaatcccctgacagctccagagtcagtccccttgggataaatgccccaaagctctgtcccccgcttccattgcagctgacggtaaacgtatcatcagaaagcccttccggatatttcctggttatctcggatccgaatatggttcccagggtgcggttcacattggacacttccacctgaagactctttttctggccgcttccaagggcgcttttgaattttcttaaaagcacctgctcatccatggtgtcctccaggtggaaatcaaagacctgttttccactgtaacctgccacatcccggccttcataggggttatccagtatcctgcttaaatccacctgagaggcccggccaaggggaaggttctcacgcctctttaaaaggtccgtgcggcccaccagctcatccacggtgcgcacccccagccttgccatatactcgcgcagctcctgggctatgaactgcataaagttcaccacatactccggtttgcctctgaaacgttttctaagctccgggttctgggtggcgatgcccatgggacatgtgtccaggttgcagacgcgcatcatcacacagcccagggttactaacggcgcggtggcaaagccgaattcctccgctcccagcatacaggccattgccacatcccttccggtcataagctttccgtctgtctccagaatcactttgtcgcgaagcccgttcataatcagggtctgatgggcctctgccacccccagctcccatggaagccctgcattgtaaatggaattccttggggctgccccggttcctccgtcgtatgcggaaataaggattacctgagcccctgccttggccacgccggcggccacagtgcccactcctgcctctgataccagcttgacggatatcctggccctggtgttggaattctttaaatcgtatatgagctgggccaggtcctcaatggaatagatgtcatgatggggcgggggcgagataagacttactcccgtagtggaatgtctggtctttgccacccacggatagacctttcccccgggcagctggccgccctcgcccggctttgcaccctgtgccatttttatctgtatctcctgtgcgcttaccaggtagcggctggtaaccccgaaacggccggatgccacctgcttgatggcggaacagcggttgttccctgccggtccgggaatcaggcggtccaggctctcgccgccctccccagtgttggatttgccgtgaatacggttcatcgctatggccaggcattcatgagcctcctgggagatggatccataggacatagcccctgtcttaaaccgcctgacaatggattccacgggctctacctggtccagggagatgcctccgtcctctggaaagtcaaaatccatcagggaacgcagatggtacatcttatcttctctgtccacctgggccgtatattgtttaaaaatatcataattacctgtcctggccgcctcctgaaggaggtggatggtcagaggattataaaggtgatcctcctcaccggagcgggacttgtgactgcccacgctttccagggtcaaatccacatccagccccaggggatcaaaggcagcggagtgaagggcatccacatcccctgcaatatccttcaatgtaataccgcccacacggctcaccgtatccgtaaaatatttatccaccacatcctttgaaatgccgatggcctcaaatatctgggcgccctggtaggattggatggtggatatgcccatcttggaggcaatcttcacaatgccgtggagcacagccagatcatagtcgcagacagccgcgtaatagtccttatccagcatgccggaggcaatcagggaacgaatggactcgtgggccagatatgggttgacggcacaggccccgtaccccagcagggtggcaaaatggtggacctccctgggctcaccgctttccagtatcagagccacgccggtgcgtttcttggtcctcaccaggtactgctgcagggccgacacagccagcagggacggaacgggcacatggttctcatctatatcccggtctgagagtatgatgatgttggcgccgtccttgtgagcccggtccacctccaggaacaggcggtcaatggccttttccagggatgtgttcttgtagtaggtaatgggaatcacctccaccttgaaaccggacttcttcatgttcttaattttaagcaaatccgtctctgtcaggatgggattctccacttttaggattttgcagttttccgctgcctcctccagtatgttgccctcctcgcccacatagactgtggtggaggtcacgatttcctcacgtatggcgtcaatgggcggattggttacctgggcaaagagctgcttaaaatagttgaacagaggctggtgcttcttagaaagcacggccaggggagtgtccacacccatggcagacactgcctccgccccgttaagggccatgggaagaatcatggtcttatactgttcataggtgtaaccgtatgttttctggagtctcagacgttcttcgtccttcatggcgggaatacatttgttgggaaccggaaggtcctttatactgcacaggttggaatccagccactccccgtatgggttgcgggacgcgtagtagtgcttaagctcatcgtcatcaatgagccttccctgccttgtgtccaccagcagcattttgccggggcgcaggcggtcctttttcaccacctttgtctggtcaatgtctatggcgcccacctcggaggccagtatcatgtaaccgtcctctgttatgtagtaccgggagggacgaagcccgtttctgtccagcacagcccccaccacgtcgccgtccgtgaaaaggatggaagcaggaccgtcccacggctccatcatggtggcgtaatatcggtagaaatcctttatttcgctgtccatatacttgtcattttcccagggcgcgggaatggtgaccatgacagccagaggcagatccataccgctcataaccataaattccagggcattgtccagcatggcggaatcagagccttcctggtttatgatgggcagcaccttgtgcatgtcgtacctgaaatactcggattccatgttctcctccctggccaccatcttatccacattgccgcggatggtattgatttcgccgttgtggacaatgaagcggtaggggtgggcccgcatccagctgggattggtgttggtgctgaatctggaatgtacaatggcaatggccgacttataatcttcatcctggagatctgaaaaaaacagcctcagctcacccaccagaaacatgcctttatacacaatagtcctgctgcttaaggataccacataggtgtcctcgttgctctgctcaaatacgcggcgggctatgtaaagctttctgtcaaaatccagtcctgcctccattccggcgggcttacccacaaagccctgggcaatatagggcatcacgtccagggccttctttccgagaatctcaggcgcggtggggaccacccgccatcccaggaatgtcataccctccttgcgcacaataatctcaaacatcttcatggcctggctgcgaatcagttcatcctggggaaagaagaacatgcccacgccatactccctctcgcctcctatctgaaagcccagaggttctgtcaccttcttaaaaaatccgtgggaaatctggagcatgattcccacaccgtcccctgtcttgccctcggcgtcctttcctgccctgtgttccagattttcaacaatatgaagggcctggtccactgtgtggtggctcctgatacccttaatattggccacggcgccgatgccgcagttgtcgtgttcaaaacgtggttcatacagtccgggctgtttctgtttggattccataaatatttcttcctttctttgtataaatgggggattttataaactaaattcaaaaaagacggcacctgtctctaggtaccgcctgcggtcattctcgtgaatttcatttaattatgttgctgcaaaagcagattacatctcgcccaatccgctctcaatggcctcggtcagggtcttcatggcctcttcctcgtcctcgccgtcacaaatcaggttaatctcagtgccgcacttaattccggctgccataacgttcagaacgctcttagcaacaatcttcttctccccacattcaattgtgatgtcgctcttgaacttcatagctgtctgtgaaagaactcctgctggtcttaagtgcaatccggatggatttacaaccgttaatgttttgctgatcataatacactctccttattcactattttgtactcttggacactgcccatgtcccttatgaaagattctattacatctgacttcctatgtcaagttaatcggaaaaatcctaagcaactttttcacaatctcagggtcagaaaaaagcgccggcattattcccgcagccgcgatttttacgcttcagcccgtgaatagacacagccgcagtaatcctgacggtaaagtccgtacaatgcggataattccacagaacgcttatagccgtttttcttcttaaaatccgaaaccagataagggattccatactggccggccagtctgcatccgatgtcattgagccaccgggcattctttaagggactgatggatagggtggtcgtgaaaaaatcaaagtcccctgacgcggcctctctggcggcgcggtccagacgcagttcatagcagcggtgacaccgctcccctccctccggatccttctcatggcccctggcaatggagaaaaattcctccggttcatagctgcctgccaggaaccggaccggccttgcagcagccatttcccgtatcagccgctcctgttccttcaccctggcctcatactccgcctcaggaaaaatattgggattgtaataatacacggtcacatcaaagtattggctcagatattccagcacatagctgctgcagggagcacagcagctgtgcagcagcagcttagggatgcggccctctctctgcagtccctctatgagcctgtccaattccttctggtagttgcgtttttgtcccggctgtgtcatttctttgccatcctttcctgaatccactgttatttttacctgccaaaaagagaggccgcccgtttacggcctctcttttgaattgctcccgaattttctgaccataacaaacacaccagaatccttttgagtcagaagcacctgtatggtaagacctacaggaaatccctgattcgtttgcttctcaccggattgcgcagctttctgagagccttggcctcaatctggcggatgcgttccctggttacattgaattccttgcccacctcctccaatgtacgtggatggccgtcctccagtccgaaccgcagcacaatcacctggcgctccctctccttaagatctcccaaaagggcgtcgatgtgttcccgcagcataacggattccacattgccctccggcgtcaccacgttgttgtccgccacgaaatcacccaggttggagtcgtcctcctcaccaatgggcgtttcaagggaagccggctccctggcaatctgcatgatttccataaccttatcttccgtcatatcaagagcctctgccagttctgtaacggaaggctcatagcccagctccagcgtcagctttctctgcatcttggacatcttgttgatggtctctaccatatgcaccggtactcggattgtcctcgcctgatctgccaaagcccttgtaacggactggcggatccaccatgtagcatatgtacttagtttgtaaccctttgtatagtcaaacttttccacgcccttgatcagtcctaaattgccctcctgtaccaggtccagaaagctcatgcccctgcctgtatagcgctttgcaatgctgaccacaagacgcaggttagcctcgattaacctttcttttgcaaactcatcgccgtcagccttacgctgggccaaatcaagttcttcgtctgccgtaagaaggggcacggtgccaatttctttgagatacatgcggaccgggtcctctgttccgattccctctaacaggtccactgcatccaggtcgatttcttcctcttctgcatctttaatgaagctgtcgtcgtctaaatccaggtccaaatcaatgtcatcaagcagaacagtgtcctcggtaagcatcgcttcgtccagtacgggaaccacatcaatgctgcggccctccaggtaactgtaaatttggtccatctgttccggtgacagattatccccggtaaaaaaatcgttaatctcccctgcatccaatgtgttgtgtttggtttttgcatgttcgaccagcttttccagcttctttaaaaaatcgtccttttccactgataaacgtcctttcgcttaaaggtaaatgtggaaactcccacaacttatcattatatactatcgaaaaccttatttcaacaattttcgacattattttttattctatctgtttccgccctgattcctcttccggatgattcctcaacagaatctgtacgttctccctgatatttccaatggtgacctcggtcctggagccgccgtattcgccgtccagcacccagtccacctcctgttccgaagtaaggcgtatggatgatgtcttgaacttatgcacatactcatttggttcttccctgagaaacatataggagataatattgctcaaatccaccggtgtcctcggcatccgtatgagcagcacctcaaagagaccgtcattgagagccacagactgattcaccagtcccttaaacccgcccacactgatggtattggtcaccatgccaaaggcaaaatcctcctccagcacctgtccgtcccactccaccttcatatgatagggcttcagtcctgccagactctttacaccttccagcatgtacgcctggtgtcccaggaggttcttcctgtcctgggatgtcagataggacacttccgtaaaagccccaaaggccgctatatacataaaattcctgtcttcacaaaaggttccggtgtcaatggcaaagggggttccctccacgatatcccaggcagccagaggcatgcgcttgggtattcccaggctggtggcaaagtcattggtggagccggcaggaatatagcccaaaagcggcattttcttaagcttcatcatcccggatatggtttcattgagggtgccgtctccgccgctgcacaccaccacatccacctttttgcccagcctggccaccacgtccatggcatccttctgcttttgggtcacatggacgcgaagctcgtacccggccttggtgaagatgtccagtatttccatcagctgtcccttaatctgttccttaccggaacggggattgaatacaaacaacatttttttcatcctgcattcctccctttcagtgtaaccatttttgtcaatcttatccaatcagctttgtatatgcattaaatgcattgggcaaagcgtaggtttgctccaggtcctccctggataccatgaagcaggacagagggttctcctcctttgagagaaccaccctgtacccggtcatgtgccactccacatgggaaaacacatgctttgcctccggcagctgctccaccgactccacttgctctcggtcaagtcccagcacctgcggcactgcctccccggaagcctttccctcaatgttgggaagctcgtagagggaagccagcagccccttgggagggcgcttgcgtatggccaccttatcctggtattctatgataaaaacggtccgttcctcaatcttcctcgccttatccggagatttgtacggaatctccttccaccagccgttttttctggtaaggcagatggatgccaggggacactggctgcatctgggttcgccgcccggtatgcacaccagggctccgatttctatgagtccctggttgtaatggctggcctcatcccgcggcatcacgtccttaagctctgcctcgatgccagccttcacagaggccttttttatatcctccctatcccccaggaccctggatatgacgcggagcacattgccgtccacagccggcagcggaatgccgtaggcgatagaggcaatggcccccgctgtatagcttccgattcccggcagccggatcagttcatcaaaggatgcaggaaggcagccgccgtattctgacataatcatccgggccgctgcctttaaatttctggcccggttataatatcccaggccttcccacatcttcatgagataatcatcttctgcctgtgccagatgtgacacagtgggaaacgcttccatgaagcgctcaaaatagggcttgaccgcctctaccctggtctgctggagcatgatttccgatatccatacccggtatggctccgggtcatccctccagggaagggaacgggccctggatgaataccaggccagcagggggcgttccatggagctgagccgttccctgcgtccaaggggcatctcctccctctccagtacctggaggcggtcatacaaatgtcctgtatcatacatatccatatatacctcttaccgatacctctcctgaaatgacggctgatacatttccgtcctcccgtctgaccaaaaggctgccttcaccgtcaatgcccagggcctttcctttatattggcctctggggtccagtaccagaacctccctgcccagattgacaagtgacttattgtagtcatccctaagacctgacatatcgcatgttttcatgaagatatcataataatattcaaaattatccgccaccgcggcaatgactaagctgcgcttgatgctcctgcccgcttccagcttaagagaggtggcagtggccttgatttcctccggaaaaccatccatattcacgttgattccgattcccggaatcacatagcggatgcattccacctccgtgctcatctccgtaaggattccgcatatcttttttccattcagcaccgcatcgttgggccatttaatcatagtctcaagtcccgtactctccttcacacccctgaccactgccagtcctgcgataagagtcagcatggatgcgctcataggagacatggacggcctgagcaccatgctcatccatatgcctgtgccggccggggagacccagctttttcccctccgcccctttcccgctgtctggcggtctgccaccaccagtgttccgtggggggctccctcctccgccagttttctggcccttgtattcgtggaatccgtctcatcaaaatataccagcctggtcccaatccactgcgtatgaagcatggatgcaagctcagcctgggttatgacatcagcaccttccacaagacggtatcccctgttccggaccgcctctattacatatccttcttccttcagttcacctacagccttccagacagcagtgcgggaaactcccagcatctcacacagctgctgtccggacaggtaatccccggtgcttttaagcatccgtaaaatttctgtcttcatatgccgctcctctatgcccagatactgacggcgcttaaaatgccaaggaccataagtcctgccgccaaagccagctgcaggatgctggcgccaaacttcttcttatcccttcctctggtcttaagctcaaatattccgtttaccgcgtttaacaaggctgccagtaaaaacaccagagggaaaagcatatgatttccctccgggttaatgaatgacagcacagccaggattacaatggcaatcccaagcatcaggtgtaccatgtccaggaataccccggaatggcgttcactccgtcctctctgtccctgcatatattatgattctcctaacgttgccagcataactgctttgatggtatgcatccggttctcagcctcgtcaaacaccacagactggccggactcaaatacttcgtctgttacctccagctcggacacatggaaacgttctcccatctccttgccaatcttggtcttaaggtcatggaatgagggcaggcagtgcaggaaaatggcctgaggtccagccaggtccatgacagcctttgtcaccttatatggagtcaggtccttaattctctcctcccatacctcgtcaggctcgcccatggatacccacacatccgtatcaatgatatccgctcccttaacagcttccgccacatcctcggtgagggtaacggaaccgccgctggccgccgcataggcctcgcattccttgaccagggatggatccgggaaatacttagccggagcgcaggccacgaaatgcatgcccatctttgtgcaggcaatcatcagggagttacccatattatagcgcgcatctcccatatacacaagctttaagcctttcaaacatcccaaatgctcgcggatggtcagaagatccgctaacatctgggtaggatggtcctcattggtcaggccgttccatacaggcacaccggcgtactttgccagctcttccacgatttcctgtccgaaaccacggtattcaataccctcatacatccttcccaaaaccctcgccgtatctgcaatgctttctttctttccaatctgtgaccctgacggatccagataggtggtacccatacccagatcatgggccgccacctcaaaggcgcaccgcgttctggtactggttttctcaaagataagggccacattctttccgcgcagcgaatctgccagcactccctttttctttttatccttcaggtccgctgccaaatccagcaggtatgtaatctcctccggtgtataatccttcagtgtcaaaaaatgccttccttttaaattcatagcgtcctccctattccgccacccatgtcctgccatggattcggcttgtttttctgcaataaataaacgtgcattcctgtttaaaaacgcatagttatttatatttatgcatctttatgcataatatactacacctgagtgccgctgtcaagtaccggaatcatggcttttaatgccgcggtaccggcttttttgtgaatcaggcgcagaagttcctccactgtataaattttaaaacggcttatgcggtactgttttgccaaatcctccagtatggacaggtaaagctccttatagtcccacccctccttcagtttcagttcctttgccagccgcggaaatatctgctctgtgtatacgcggtatcccgcgatggtttccttctgcacctcccgtccggtttttacctcccctgccgcttccagctccggcttcatgtaagagaggaggctttgtatctctgacatcatcttgtcaaggtaatatggttcaccttccggcgcgtcaatataatagacacgtcccgccagaccataaagcatacgttttccgtcaaaatatcccaacagcatgtttcttctcgcccggcgtctgtcaaactccagaaggccgcccaaatccctccggggcgccacatggtacaggtttacccctcccggtacctccagcttcttttccgtatccacgccataaccatatatccgcaggacaatcacgtccttatatcctctgtccagcagcacatccaccggcacattattgattccgccgccgtccatataatacttgccgcccagccgttcctggcggaagcccagcagataggcgctggccataagcaggtccgccaccgtgccttccggagcctcctttacattggcaatcaggggctgccggtcagaaatggagtaggttaccacatacagctccctgtccgagtttcgtattttctcctcgtccaccacatcctcaatcaaagccctgaggggagcgatatcaaatccgccgtccctcaggacccgtatggcccccgttatgagttcccccacattcagggatgccagactggaaatatccttaaggctgaactttctcagacgctccataagctcgtcgtccacatccatgaccctggagtagctgatattctcccaaatgcgctccgccttttcaaaatcatccatgcaaataagggcaccgttcaaggcgccaacggaggtacccgcggcgccctttatccggatgcccgcttcccggagggcacgccaggcccccacctgataagcgcctttggcgcctcctccctccaggacaattccatattccttactcaagtccagccgcagcttaatgatgtccacctgccctttcccgtctgcccagcataaatgccacaggacgtataagaataagcgtaaggaatgatacggccacaaacactgccagctgcgcctccataggcagcccggccagggctgccgcaaatccgcctatggcccctgcggcaaaccacagggacgtcaggcagccaaaggccagctccactcccagaaaaatcaaaaatgatacaagccatccaactgataacatatgcaccttctccttcctgcgggcagatatggccggaagtcctttccttacgctgtttccaccggaacgctcattcctgacgcgattctgtcactgccggcagcttcttctctgtctggcagtctcaaacataagaacggaagcagcaaccgccgcgttcagggattccacctttccctccatgggaatcttcaccaggcagtctgccagcgaggcggtttcctccgtaagaccattggcctcatttccaattaaaaagcccacattgtcagtataatcctcctggtcataattattcatgcctttcagatgggccgcaaaaagacgcacacccttatttttcatgagcaggcaggcatcctgcagatcatccgcatacacaaagggcattctgtatatggaccccatcgtagagcgtataacctttggattatataaatctgccgtagcatgattcataacaatgcctgtgataccggcgccctcccctgcccggataatggttccaaggtttccggggtcctgaatggtctccaggaccatgatagccaatggcctgacgcctgacgccggtctcacaatgtcatccatggtatagcgcttctgcctcaccacggccagcactccctggggcgtccgcgtatctgccataacattcatggccgcatcgctgactgtctccggccggaaccgctccatccatttcctgttatcccggttccctgcaaaattctccgtaacatacagggcatccacatcctccgggttcagctccttgcacattctgaggccctccaccacatacatgccctcttcccgccgggcctttgctttgcttctcaggctcacaacacgctttacctgcttgttcgatgtactgttaatcatccgtatccattctcctgacactgcttatttgatgccttccagttcctccagccacagcctgcccgatgcatcgctgggcatcctcaaatcccctctgggagaaaccgccacagaacctaccttaggcccgtccggaaggcaggaacgcttaaactgctggctgaagaaacgtctgtagaacacgttcatccattttaggatagtctccctgtcatactgtgacttaaacgcctggaacgccagacggtaaatcttggacggggcatatccgtatctgagtatataatagagataaaagtcatgaagctcgtaaggccccaccaaatcctctgttttctgagaaatccggccgtcctgcgggggcagaagttcaggactcacaggtgtgtccagcacatcaagaagcacatccgccagctccttttccctgcatgtatccgcatagtagcggaccagatggcggaccagggtcttgggaaccgacccattgacaccatacatggacatgtgatcgccgttataggtagcccatcccagcgcaagctccgacatgtcaccggttcctattaccagacctcccacctcattggcaatatccatgaggacctgggttctttccctggcctggctgttttcataggtcacatcatgcctgtccatatcatgaccgatatcttcaaaatggcgtgtcaccgcttccctgatattaatttcacgaagttccgcccccacctttcccgccagagtgcaggcattattataagtcctgtccgtggtcccgaagcagggcatggttatgcaatgtatgccggacctgggtatcttaagactgtcaaatgccctcacggtcaccagcagagccagcgtggagtcaagtcctcccgacaatcctatcactgcttcacggcatcccgtgtgctccaggcgcttcttaaggcccatggcctgaatggaaagaatctcctcacagcgcctgtttctctgtctctcatccctgggcacaaagggagccgggtccacataccgaagcacatcaccgcctggctgtgaagaacccgcggcctgggcattctggctcccggggctggcctccaaaaccgcgtcaaggttaaattccacagccagatatccgccttcctccctggcagccgccgggtccggaaatgtgctcatacgtctgcgctcactgtccagacgttccaaatccatgtcagcacatatactctcgttgataaaccgtctggactctaccaggcatgtcccgttttcagctataatattctggcctccaaataccaaatcctgggtggattctccctcccctgcattggcatagacataaccgcacaccagcctggccgactgactgcatatcagatcatggcggtacatgtccttgcctgtggtctcatcactggcagagcagttcaccaccactgtggccccggccagcgcgtgtctgatactgggcgggcatggcacccacacgtcctcgcatatttcagccgccaccgtaagttccggcatgttcttacacttaaacaggaggtttgtgcccataggaaccttttctccattccagtttgtcatcactgcccgctcattgcccgggcaaaaattcctggcctcataaaactccgaataattaggcaggtttctctttggcactatgcctagaagcctccctttttggatggctgccgctgcattgtagagcttgccatcccgctcccagggaagccccaaaaacaccagaatatcctttccgtccgtaaaccggacaatacggtccagttcttccctggcctttcttaacagggccttctggccaaacaggtccgcacatgtatacgcagtaaggcaaagttccggaaataccataagcttcactcccctgctgtatccctggccaatcaaatccataatctgctgtgcattatattgtgggtcagccaccctgacctttggcgtggcagctgctacccttaaaaatccatctttcatctctggcctccattgaaaataattgttttgatttaatataccacagattggcagaaaaatatagggaggaattgggccggatgggcactgggaccctgtaaggtttcggtgtatggttttgggggaaaatccccatttacatcccgccaattctattatacaatcataaaaacaaataaaatacaggagttatttctattatgataaatgaattttccagaactgaaatgctcataggcgccgaaaaaatgaatacccttaagaactccacagtagccgtattcggggtgggcggagttggatcccatgcagtggaggccctggccagatgcggcgtgggccgcctgattcttgtggacaatgatacggtctcccttacaaatattaaccggcagagtattgcgctccacagtaccatcggacagtttaagacccgggtcatgaaggaaaaaattgccgacatctgtcccggcacacaggttattacctttgaggaattcgtactacccgataatatagaaagcctttttgaacatatggagctccagatggggcagggcaactctgtggattatatcctggatgccatcgatacagtgaccgcaaagctggccctggcaggctttgccgcctcccacggtatccctgtgattgcttccatgggtaccggcaacaagcttcacccggaactcctccggatatccgatatctcccagacctctgtgtgccctctctgcaaggtgatgcgcaaggaattaaaagccaggaatatctccggactgaaggtctgctggtcaccggagcagccccttacgcccggacagacggcggaggataccgggtgccgccgcgccactcccggaagcatatcttttgtgccgcctgtggcaggacttgtgattgccggagcaatcataagggatatctgcgggctggaatgaatttttaaacacattctggcatagccgcagatatccctctgctctctttttataattattcatccccagtcctattccaagggcgcccggtaaaacctgcctacaaactgctgtgtcctcagcacattgatgatgatatgctcatctgcttcctgcatgatgtggatggcgttgtttacctcataggctgatatgactgtatttaacaggtacattttctttttgctgtaccctcccatggcttccacacaggacattccatggcggaaatgactgatataggcatccaccacttcctgtccttttatggtagttgcctgaagagtaaccagctcatagcggtgatggaaggcggaaatcatgcgggtggagataaactggaaaataatggaatatcccgcgtgcttccagccaaaaatagcgccgtaaaaacagtacatgacagcatttccaaaaaacacataggaccagatggaaagcccggtgcggttggatacaaagagggctataaaatccgtgcctccggtggaggcgtttccccggagggcaatgacgattgcacttccaaaaatgacgcctccaaaaataacattcagcacttcatctgtaaagatggggctgaagttaaatatctgcaggaaaatactgcttaaaaatacctggaccagggaaaatattgtaaaacggatgctgattcccttacagcacaggattgccaccggaatattcagcaaaagcatggtgacctgcatgggaatattaagccctttcaattcccccagccgttccacaagcatggccatgccagtaaatccgccggatatgataccggccggccgcacaaaaacctgcagcgcataagactggataagcgcggatacaaacaccgcagccactgtaatgcaggttcttaccctcctgtctttcttccactgattgataaaagctgaaattctcagaatctgtcccataggaaatttcgctcctgtttcatttagttatcatatcacataattatccttcatgcttttctgccactggaccaaatcctccaacgtatatttatccaccactccgctgatggcctcatccagctcgcgccacaggcgcagggtcacacagtccatctgcctggcacaggggttctcatccccgcttaagcagtccaccggggccaggcttccttctgtgattctcaaaatagaacccactgtatagtccgaagacggtctggccaggtaatatcctccctgatttcccctgatgctgcgcacaaagccggccctggataagatggagataatttgctccagatatttgccggatattccctgacggttggctatgtcctttattttaacaggctcgccgtctccgtgaatggctaaatccaccatggtgcggagggcataacggccttttgtcgatacaagcatatatgttcacgtcctttatcttaaaatttatcctgacatgagtatatcatactattcccgtaggaaatatgtcaatagcaagttattgttcctgccaggtctgttggattgctttatgaatagagtgcgccattttcgggaaaataatatggaaactgagaaaaattgcaggcctgattccatgtagccggcctgctaatcattgagaacggaggattttcatgaagaatgaaccggtattcctgactgacaaaaaccacaacatagtgttggaggccctttcaccggctcccaatgcagctctccccgattcctgcaaaccctttgaaatcctggagcccacaaccgctgaaggcgcagcggaaaaacatcttccggtagtggagcagaatggactccgtgtgacagtcaaggttggaaacattttccatcccatggaccaggagcacagcatcggatgggtgtgccttgtgacgaaagccggctgtatcatgcgcgttccactgacccctgattgcgagccggtggcatccttcaccctggaggagggggatgctcctgctgcggcttacgcttactgcaatctccatgggctgtggaaaaaatcagtctgattttgcccgcctttgtttcccgggcaaagtgccggaaacatccggacaaaaatgagagccgcccttcccccacagaaggcagctctcagtcacgatcaaaaaccgtcacactattagtttatctggcatccccataccaaacaaaaacctgtaaggcactcctttgtgcttcttacatggacactataccaccgcttccatgatttgtcaatcatctttgtgcatattagtgaatttctttcccctataaacaagtttttatataaaattcttccatttttccacagttcaaagacaaatgtctcctgtatatttatctttcatcggtacatactaacttaagccataatttttatctgaagtcacacagaaaggaagaaaccatggaattttcccaaaatttaaaggacaacattacttaccttcacaagaagctgaatgtacagacaaattttgacgtggtataccgcgtagtccacatcggcggccgggaagcatgtctttatttcatagatggttttacaaaggatgaatccctgttaaaaattctgcaggtattctccaccatcaagccggaggatatgccaaaggacgcccacggcttctccaaacagtatgttccttacggcgagattggactgctttccaatgaccaggatatgaccgtccagctgttgtccggtgtgtcctgcctctttattgacggttatgataaatgtattacgattgactgccgcacctatccagcccgcggcgtcagcgaaccggaaaaggataaagtcatgcgtggatccagggatggctttgtggagaccctgatttttaatactgccctgattcgccggagaatcagggaccccaggcttaccatggaaatcacatccgccggagagagctcccacaccgacattgccatatgttatatggaaaaccgggtggataagcagcttctggataaaatcaagaaacggattcagaatctgaaggtagatgcgctgaccatgaatcaggaaagcctggcagagtgtatctttccccataaatggtttaatccattccccaaattcaagttttcagaacggcccgataccgctgccgcctctattttagaaggaaatatcattatcctggtagacaattccccttctgccatgatacttccctcctctgtctttgatatcatagaggaggcagatgattactactttcctcctattacaggcacgtacctccgtctgtccaggatgaccatatccctgctgtccctgcttttaacccctacatggcttctgtttatgcagaatacggagctcataccggactggctggcctttatccagctgtcagacccgcttaatgtgcctttaatctggcaacttcttatactggaatttgccattgacggcctgcggctggcggctgtcaatactcccaatatgctgaccacccccctcagtgtgattgccggtattgttctgggggaatacgcggtaaaatccgggtggttcaacagtgagaccatgctctacatggcctttgttaccattgccaattactcccaggccagcttcgaattgggatatgccatgaaattcatgcgcatcatcattctaatactgacagccatcctgaatatatggggatttgtcatcggaatcatcctgtcggcctgcgctatcatattcaacagaaccattgccggcaaaagctatatttatccgctgattccattcagcctttcagaattaaaaaaacgttttctcagagggaggctgcctcatacagaaaagtgattgttctattcctatggtaacacagtatagagaagcagcgaaccggccttttggccggttctgctccctatcttatattgttatacatatcaaaataggcccccgcctcttccaggtcatcttttataagggctttaatgccttcaaagtttatccgcatttctgaacagggtatggccattggcgtttttcaccagaccagtcacatcaggctttgccaggacaacggcattcagataatatagaggtataatgggcatctcatccatcaggatggactccgcctccttaaatatctccatacgcttactgttatccgccaggttgcggcattcttctatcatgctgtcatacttcatggcattgtctccgctccagcggttctggttgtaggcgcgggcctgggtaaagcagttcagattggtgtccggatccaggtagtcaccggtccatccgtcaaagcagacgtcaaagtttccggccttctgctcatcccagtacaccttggactcaaaggtaacaatatctgcctgtactccaaggttatccttccacatagactggattacctgggcaatgtctttgttctcttttgtgttggtaacgatgaaggtcagaactggcagtccctctccattgggatatcccgcgtctgcaagaagtttctttgcagcctccacatcctctttaatcaagtcgcctgacacggtgcggaagtcgtcagaggagccttcatatggtatcccataaggcacgaatccgtaggctggctcaggcttagacggaacaatggactcgcagattgtcctgcggtcgatagccatggccagggctcttctcacatccggattggacagatactccctggaacagttgaaatcataataccgggttccaattttgtcatatcccttcagttcttccgtgttctcatactggtcaatggcctgggaagttaccaggttatcgcccattgcgtcaatttcacctgcattatatgcagacagggctgactccggagactggatgattacgatttccactccgtccagtttaacggagtccgcggcatagtaattggcatttttcttcagtacatagctgctctggggatttatcttctcaagggtaaatgcaccgttgcacacataggtatccgcggatttggtccatggctcctgtccctccaccacatcctgcttaacagggaaaaagttgctggatgcagtcagataaagaaaatatggcgtaggtgctttcagggttacctccagggttttatcgtccagagcctttacccctacatcctggacagaaccgccctgtgtgttgtactcttccccgcccttcagatagtgcagttcccatgcggccggggaagccgtatctggattcaggacgcgtttccaggaatattcaaaatctcctgccgtcaaatcgcttccatcggaccatttaagtccgtccttcaatgtaaaggtgtaggtcagtccgtcttcgcttacctcatatgtgtcacacatggcattgctcaggcttccgtctgcctccagctggaacagaccgcagaacatattctgcaggaaggtggacgatgtgctgtagttattcagggtggggtccagtgtttccggttcctccatcaccgcataggtaaggattttctctccttcttttgacccggcagccgcatctgccgaaacctctgtgccggcatctgacccggcaggaccgctctgtgttcctccgcagccggccagggtggtggcagccagggctgcacacagtaacaggcttaattttttcttcatagatttcctcctttttccggattcccgttgagcagaatccaatacagaaaattatacctgtattctccgtggaaagtcaatacatggaaagcagtttgacagagcaggccttgtcaccgccccggcccggccgccgtcccgcctctcctgttcagaccttctcacctactccagctccaatccgcctgtatacagctggtaatacattcccctctcctttatcaggctctcgtggtctcccgtaagcatggtatcatatccttccggaagcatctctatgaactggccggcattggccagctccgcggcatcgcagatctccctgcccgcggcatttttattgccccaccgcaggttatcacggatggtgccgctaaacaggatatttttctgcagaaccactgtcacctgatctctcagggccttaagcccatactccttcacatcccgtccctcccaggagacctatggtttctccggatttaatatggatatccacatccttaagggccagcttctccttatcccctatgcagatgaaggacacatgttcaaagtcaatgcttccgcccgccacctcctgtaccgggtcgtccgggtctgacaggctgctctgttcatccagcacctccacgatacgctctgccgaggaacgggccatgatgaccatgccaaacatcatggagagcatcatcaggccggacaatatctggaccgcgtagataatcatgcttgtcagctcgcctgtggtcatgctgcttcccacaatgagtctggctaagacggtgccgccccgtggcagccataggccctttcgctccatcagcttcagaatctccgtggctgtggggcggcgataaggcggacggttggatttaattgcaacggctccggcagcagacaagacagaccccggagggtttctgggagtttcccctggatttgataaaatgcgcatttacaacctggattttcctgctataattggtaggggtgtcttatcccaattcatattctgagaggttatcatgaaatacaattcacatcaatttcattgcggactaaaagatggcgtacccatcgggctgggatacctggccgtttcctttacctttggaatcatggcaaggggagccggcctaaccactctccagtccgttgtcatgtcctttaccaacctgacaagtgcggggcaatttgcagccctgggaatcatacaggccggagccccctttatggaaatggcaatggcccagctcatcatcaacctgcgctactgtctcatgtcctgctccctgtcccagaagctgagcgcagatatgcccttcttccaccgtttcttcatgtcctatggggttacggatgagatatttggcgtgtccgtatgccgccctggctgtctgagtcccttttacagctatgggcttatctgcgttgccgtacccggctggacccttggcaccctgctgggagccgtttccggggaactgcttccggcgcgcctcttaagcgccctgaacgtggcgctgtacggaatgttcctggctgtggtgattccgccggccaagacaagcaggattcacaccggcgtcatcctggcctccatggctttaagccttgtgtttgctcatgtgccgttcctggcaggtctctcatccggctttaaaattatcctgttaaccatcctgattgccggcgcggcagccattctgtttcctgtaaaggaggataatgaacatgaatcataatgtgtacctatatatccttgtgatggcaggcgtaacctacctgattcgtctccttccgctgaccttgattaagaaggagataaggaacgtatatataaagtcctttctctattacgtcccctacgtcaccctgtccgtcatgacctttcctgccatcctccacgccactgcctctgtgtggtccggcgcagcagccctggcagtggctgttatcctggcctggaagggcaagagcctgttccaggtgtccctggccgcatgtgccatggtattcctgctggaactgttcctgtaagcaagatcctttcatttcccagaactcctacagcgacaatccgcctcttgcccttgcccgcctgtccatgacagactggatgaccggaaccatgaatattgcaacaattccgcctgcataaccgttattatacaggttcatgcctccatacacgattcccacattgagggcaacggaggaatgcaggtaacctgccacgattccggccaccacgccaaactccccggccaccggcgcaagggtggtggagaataaaagggccagcatgggagagggctgataaatgttccatgtcttggtgaagctggccagatatacccccatcatcaccggagctatgttcctcagatgttttcccgtggccccaaagcccacaacggtaaagataccgcagatggtgggtccgttcagctcacctcccactgccagcacgaaataggtggcgaacagtccattgactcccatattgaacacggtgctggcgccgccttcatctctcagataatccgttccgccgattccataggatttgatgattcttttgtacgattcccagatacttctgccccgcaccgcaaccccaaagacgatcattccgccaaacagtacagacagcacgataccaaaaacctcattgtttcccgtggaccagatgagcctggattctatctccactccaaaggattttagcactgacacaatgactgtggctatgatgcccgcggcaaaccccacattgtacaaagagtatcctttgtgtgcaaaatgcacatgggtggaaaggggcggcaaaacaaagcctataaccagccccacggccagagctatggccagccgcatcaccaacggcaggttgcccacctgcatcatctgggtgatgattggcgaaagactggttccgtacaggccgatgtagatgtacctgcgcatggacgtcttgtggtacctggcgtacaggtacactccggccaaaatggcccagatgttaagcagatttttgccaaacagtgagaagccgaacatcaggcagctggatgtgatggtgtggccgtccatatccatacccataaagtagatgataccaatgctcataagcgtcagtgcaccggcgttaataagggccgcccccacaccgcccacaacgaaataatccgtaatcagaaaatcgggctcttttatcagacgcacgattcccggacctatttcctggattggctgcaaaaacagcccaatgaccataaaataaacaggaagcagggacagaagaaaaaacttctgcttcctggtcagggatttcagttcatgaaaatgttccagatgtttcataaatacctcccaatcagcattctttttctatcataactgatagacccccggttggcaaagacattttttacttctgttggaaaatttattattacgggccgggtccggcatgtcccggtatatttacggttcaggtacagaaaggcagtccagggatatctttcaaccgccgtcccaaaacaaaaagcgcccggtcacccgggcatccacatctcacattttctattttccaaatgtcacaaaccgattatcccttaacatcttcacaaattcagccagccgttcatacagcggctcggcctggtctgcgaattcttccctgaccagcactccgatgtcaatgatattcctgtttccgtccatctgcttccagacaaagcttccgaaccggtccagcttcacatggctcactttgggcgtgacccacagcttctgggccagcttatcaaagattcccttgtgcaccatgtccacggtcactattccctgtccgtcctctttccacgagaactcggggtttctgaccggtaccttttccagataattatggtcctttttcttattgaagcccaatgtaatccttccttccatctccgtcatatcataagcatacacagggcgccggaatacctgacaccccatgcacgcggaactcacaccatgttataccagtatgcttatttcctgttctctttatgccagatggtaaatttgcacatggtaagcatcagcagagcaaagacaatgagtgatacaatctttgctgccgggctcacaaggaaagcgcccaatccgttatccagggcagacaggttgatgaaatcgcccagatacccgcctcttgcgcttgaaagagggatgatggcaaatacggccagcatgattcccaccagaccttctcccgcaatcatacctgatgtatagagcacgccccggtcaatagcctctttcttatcctcttcctttgcgtatttacgcttttcataccagtggcgaataagtcctcccaccatgatggctgccgtggtcctcagaggcagatataaacctaccgcgaccggcattaccggaatcccaaggatttcgataacaacggcaatggccgcgcctgccagaatcatgttccatggaaggttgccgtccataacgccctctaccacggtcttcataatcatggcctggggagcaggaagctctgccgagccatagccccatgcctggttcagaaggtacagtacgcctccgatggcaatggcggaagaaaccacgccaatcaactcgcccatctgctggttccttggtgtggaacctaccagataacctgtctttaaatcctgggaggtatccccggcaatggccgcaatgacgcagatgacaccgccgatggagataacgcccatcatgctctcatgggtggctccggacacagctttaagcaccagcgctgataccagcagagtggcaatggccataccggataccgggttattggaggaaccaaccaatcccaccagacgtgaggacacggccgcaaacaggaaaccgaacacggcaatcagcagagcgcccacaaagcttacaggaacagccggcaccagccatatgattaccacggcaatgaggacgcctatgagtaccacattcatagggatatccctgtccgtacgcagggtggaaacctgacgtccgcccttcaagtcccgcatagcatccctgaaggtatttacaatcatgggaagggacttgatcaggcttatgatacctgccgctgccacagctccggcgccgatgtaacggatataagagccccacatagcctggctgctcatctcgctgatcagcacatctgccggtgcaaagggcgttgtgagcccgcctccgaacagcttaataatcggcatcagaatcagccatgatataatgcctcccgaaaacatgtaggaggaaatctttggaccgcagatgtaacctactcccgcaagggcggggagtacggaaattcccacgccgccgccgtatttgcggatatcataatccacatcgccggggaacagcttcaggccgtcagccacaaacttgtacaaagcggcaattcccatacccgcaaatacaacgcccgctttggaaccgccctgctctcctgcaatcagtacctcggcacatgcctgtccctccggataaggaagaaccccatgctccttgacaatcagcgcctggcgcagcggaatcataaacagcacacccaacacgcctccgcacagcgcaatcagcgcaatctcaaccagggaaggcgcgccctctccccagtctctcatccacataaacagagccggcagggtaaagatagctcctgctgccacagattcaccggcagaaccaatggtctgcaccatgttgttctccagaatggaatcccttctgaggatgacccggataacgcccatggagataactgccgcaggtatggacgcggacacggtcatacccacgcgaaggcccagataagcattggcagcgccaaaaaggacggccagaaggatacccaggatcacggaaaccgcagtgacttccggaaccaccttgtcagccggtataaatggtttgaaaccattttcatctttcatgtatctatcgctcctttcgtattgaccacataaaaaccaaatattttggctcttacgtgagatacaagccaaccctgcctaaacaggacggcttgtatcttatccccgtaattatagcatccttcagaaaaaatttccacattttttgcgaaaatggtatgaattgcattaatttttttaatttttccatcattttcatttaataaaacggccacacagccttacaaaacaaagtattttctctgttttgtggcttgtggccgaaaaaaaattccgaaatccattatttttcacaatcaaatacaagtccccaggaggcccgtatatcgtccatgagcctcaggatgtccagagtatcttcttttttatgtacatctttaagtacatctctggaggacatgcccagccggacgcaccggttcacctcctgtatctgatactcaaagccgtttacctcaaagggaaagtccagaacatattcctcccccttcattccatttaccgtgtcagcgaattttgccgctatgattccggttgccaatattccaatttactatgaaacgcgtccgaaacacgctctaagtatccgctctggccagcgtgctctccaggctcacatccttacccgggtcaaagaaggcatagcctgctgcaatgccagccggaaatacattcccgtcgctgtatgccttcacggccctttccatggccaggattccacggaatacctgatcctgccccaaaccgtctaactgtaccacaaactcatccccgccaatgcggaacaggggcgcccccggaaatgcttcccgtataatgtccgcggacctgcggatgtattcgtcccccctgtcatggccgaagcggtcattgaccccctttaagtcattgaggtcgcacatgaggaaaccgctgcccggtatctcctccgtatggctgttcttgtgccgcagcatgtgttcataagccagccggtttccaacacccgtgagtccgtccctgtcacgctccaccttcagcgccttggtctcaaggatttcatcggtcacatcctccaccacacagcggatgggatgggccgctgttttacatgttattcattctggctgctgttgcggtccggattgttattcctgaaatacagggcggtcagagagccgtccgtctccccttcgtccggcagtatcaggaacacgcctgtggtctttgtgtcgtacagggcatccaggacctcgggtgccagcgcctccagcaggcggtccggctgtccccggtattccagcccgtccggactgtcaaaataccggcttatggtatctgtatgatggctgaaattagtccagacattcttcatctggttctccagattattcctgcggccctttaccttttccgcaaatatacggtactggttggcctctgcctgttccatgactccccctgccaccatgaaggacaccagaagaacactctgcagtaccaataataccacaaatgctatgctcagcttaaatgctatggatttacttctgaattttctgtccatctgtcttaccagccatttcctttaggagtgtttcataccaacggttaagatgctcctcgtccagcagctccctttccaccgactccctgctctcacctttttccatccgctgcttcagggtttccaaatccgcgttcatacagttctccagcgatacggaaaatatctggtccatgtcataagacccctgaaaggtttcgcggacatatacattatggttttccagggcatcaaatgaggtccggatgctcttctccactgcctggacattgtcccggctttccacatgggccaccgggtctgatacggattccagcgtcttctcctgcactggcagatatcctgtagccattgcaaagcgtatattctgctccggctcagtgaaccatttaaggaaccggaccgcggcctgctggtgactctcatccgtggaaaacaccgccatgttggcccctctctgtcccatataagacgtaccgccctgaaaaacaggataggcatagctgccgcaggcgatgggatgggactgtttttcatcctcaattaccacctgcggaaagaaacccgcgcctgccgaggaaccgatatagtgggcggctgtcagagaggcaaagtcattgaatgcgttcatccccaggaacggactgcccccggaccattcataatacatgcccgctgcctgtgccaggccctcccaggttttaagcatctctttgtccgctcctgtgtccccggcaaaccgttcccaatccgtttcattgagatagagaatctccgtggattttgccaccggaatcatccggcagatgccgtccccctcccagattccctccttcaggaattcaggccggtaagcgtccagttcttcttccgagaaatagtcatccagatggaccaggggcactatcccgtccagcctgtgggcgctgtccggataggatgcaaatatatccggcagcggatctgagccgatgacatggctggcggacgcgtacagcacatcatccagttcattgccggagccatatcccaccggttccactatgattccctgttccatgcccacagtctcgttaaattccatcaccaggtcatcaaacgcgctcttggccactgcgttatgggcatgccagagcactaccaccgcaggttttccctcatcttccttttttccatctccggccatgcatccgccaagccccaaaacagcggccacgacagccgccaatatgtatacgtatggtctgcgattcataatgaatttcctccccgtgcggtctttccatggcagacacagatgccgccacactccgaacacgccacatcttaagtataacacgagaaacagcctgctgtctattctggtttaataaggaacatcccaaagaaaaagacaggactccctggtcctgccttgttctttttatgcctctctgcctgaatgtgagtaaaatgtaatcagatacagaccacacaaccctaccagcgcatagatgatcctggtcacccaggaggctgttccgaaaatccatgaaaccaggttgaaattaaagaatcctaccagcccccagttcacagccccaatcagggcgattgtcagagcggtataatccaatgccttattacccattgcatgctacctccttgtcatgagcatttcgtgtctgctttccagacacatatgcagcttgctatacgctggtagtatgtaccggtttgtggaattccatacattttttgcttattttatcgcgattcctgttttccggccgatgaaggcgcttctgccggcggatcctgattatcctccccggccgcctctctcatctgccggattacctcctccggaagtatgtcatacagacggttccgcttaagagggggctgttccagatattcttccctcagcatgccgtttacccggtccagctcctccttaagctccctggccgatatcaggcggcatccctgacccagtatgatgacttgttccactccgtctgaggttgccacggacacatcgaatctgcgggcattttcatgggcaaacttctctatatactggtccgctgtctctgcttcctttgtgtagaccacccggatattgtggtattcggaaacctctgtgacatgtcccgccacgcggtaggcgtcaaacaccaccatgagacagcacctgcgtatggcctgatagttgcagagcagatccatgagccgtcctctggctccgtccatgttatcccgggccagctcccgcagctcctcccaggcaaagatgatattgtaaccgtccaccagcagatattcctgtctggcctcctgtttctggtaggttcgggtcaccgggccgctataggttacggcgttcctgctttctctgctcctgccgggatatcctttgcgcggtgacttatcccggctgttggaataaaaggtgcgctccagtatggcgtcaatctcatccgtgcccagccatgcttccacgtgttcttcctgtccggcagaggattttcccggattcctgcaaaaagccaaatcccctttttcatccatttcctccccatccggggattctattacaagaccgctgtccacatgcatatactccttcacccggtcccagctcaccacgaatccggccccgtgggcgcagaacacggagcctgtgggattttccgtatctctctccggatcatagccggtctgctcaatgatttcccggctgttatggcagggctcgtatcctttgagcgtacatgccagcctcccctgtcccctggtgtacgacatgacctctgactgatacccacgcatggaggcaaccggcgcctgtcccgtgagaacggcctgtccctgcctgttttcctcgatgacacaggtcccgcaccgcttctcaatatcggtcatggcgcgcccgatggacgcctcaggcacttccagacggaaggtataccacggttccaagaggatacaggccgcctccataagcccctggcgcagggcccggtaggtggcctgcctgaaatcccctccctctgtatgcttgttatgggccctgcccgccacaagggtgattttcatatctgttatggctgctccggtcagagccccccggtgcaccttctcttccaggtgggtcagcaccaggcgctgccagttcctgtccaggtcatcctcgctgcatcttgcctcaaactggagtccgcttccgcgttctcccggttccataagcagatggacctccgcatagtggcgcaggggttcaaaatgccccaccccctccacggcgcccgcgattgtctccttatacacgatgttccctgtgccaaattctgcccgaactccgaaacgttcttcaatcaggctcttcagcacctcaatctgcacttctcccataagctgcatggatatctctttcagctcctcattccataccacccgcagcagtggatcctcctcctccagctggcggaacttgggcagcatcacagccccgtcgcagccctccggcagttttacctgataattgagcacaggctccagcaccgggagcatggaatcctccccggctcccagtccctgtcccggataggtcctggtaaggccggaaacagcgcagatggttcctgcctccgcctcaggcacagcctcataccggtccccggaatatacacggatctggtttactttttcctgccatgcctcggatggcttttcggtattcccgccggatacggttccctttaccttaagtcttccgcctgtaatctttaagtgggtcagacggtttccctggtcgtccctggaaatcttgtacaccttcgcctcgaactcctgcggatattccggcatcagggcccatctgcggattccatccaacagctcctccaccccggtgagtttaagggcagagccaaagaaacatggaaaaagcctgcgttccttaatcaggcggcggatctcatcatcctccacatccccggtctccagataccgctccaaaagcttctcgtcgcacatggctgcgtgttccatgaattcttctgtccccgcaccggcaaaatccacacatccgtcgtccagacgcttctgcagctccctcatccgctgctcccggtccgtgccgggctggtccattttattgacaaagaggaatactggtatcctgtattttgccagcagacgccacagggttatggtatggctctgtactccgtccgcgccgcttataaccagaaccgcataatccagtacctgaagcgttctctccatttccgcggaaaaatccacatggcccggcgtgtctaacagcgtcatgggcattccctcccatgtcagggccgcctgctttgagaaaatggtgatgcccctggccctctcaagggcataggtatccaggaatgcgtccctgttgtccacccttcccatcttacgtatggttcccgccagatacaaaagcgcttccgataatgtagttttcccggcatccacatgggccagaattccaagtactattgatttcatatcctgtctctcttcctgctgtcttgtctcccttaacatggccgcacatccaccgtattgtcgttaagggtggtggctgctcctatatcggacagccgttcatggtggagggcgttgaccagaagcccgtcttttgtaaaggtcctgttgtaaacgcccccggccgcaaccgttccttccgccaccacaggcgtgattttcgcggtaaactccacctttgccagctcattgaaggctgtaacgtgactgccgtccgcgatttttctcgccgccgcgtctcttggatggagcatcagcgtcatggggcctctgcctgagcttaagtcctccctgtccataaagaccgaattcagcgtatacgcgctgggcactgccaccagccgcagagggtatgctcccccatggcttttcatatatctgggcatggcctcttccaggttttcattataaatcatcattttaccggaaggcgtcctgaagcttccgtggtctgcaaaggccgtggatatgactcccccttcccttaatatgcgccattccttctctgagatacgggttaatccctccatgggatgggccagcagctcctcaaccatttcttcctctgtccttttaaagtattcctccccgtatcccatggcccgggccagcaggcggaaggtgttccaattgctcttactctgccctgccggctcgacgatttttctggctgtcccaaaggtacagtatccgtatgccgtgtacacatcggtctgctccacggaaaatgtggcgggcagaagaatgtccgcgtacatggccgtatctgtcatgaaccgctcgtggaccaccgtgaacaaatcagggcgcaaaaggccctccaggattcccttctggcagcagacagaggccaccggattgcctccgtagacgtaaaagctgcgtatgggcttctctcccctgcttcctgtaagggcggaggcaatctcattgatattcaccctgcgccccggtttcttcctgaaatccggcctggtgaccagccggtcgtccacataaggacccgcccccggattacagccgcacaaaccgccgcccggacgcccccacgcgcctgtataagcggacaaaatggtgataagccgtgtggtcattcccccgttgccataacgggagggaccgcttcccaaaatgatggccggagccggagccgaggcgtattcccttgccaggccagcaatcacctctgcggggatgcccgtctcctcttccgcccaggcagaggtatatggggcaagggttttcctgaacgcctcatacccatttgtccgatgagccaggaaatccctgtccgccaggttttcttcctccatcacatgcatcattgccaatgccagggctccgtctgtgcccggacgaatgagaatggtctgatcgcagtagacatccatatctgctgcgcaggattctatgagcaccacccgttttccctgtctgcgtgcctgaatcagcgccggcatggactgaagcctggtggccttcatattgcttccccacaccaggtagaaactgctgtccttaagctcccttggatccagacagccggtctggcccatgaccgcctcatagcccgctccctttgctgaagaacagagtgttctgaccatgtcacaagcccccatccggttaaaaaaggcatccccgcatttgcgctgcaggacactcatgacccctgaataatacatgggcaggatggcatctgcgccgtcttcctccagaatacggctccacctgccggcaatctcctttaccgcatcatcccaggtcatgggtacaaaccttccctctcccttggcgcccacccgtttcataggtataaggatgcgctcaggtgaatggacagacttctcatagtgccgcatcttcctgcatatcagcccctttgccgccggatggtccggatcgccttttacgcccagaatcctgattccgtctgtttctgccaaaagtccgcaggacgtgggacagtcgtagggacagattgtttttcttatatatgatgccatcttatgtcactccctctattactgcgcccggtacacagcccggcctggttcttcccgtattccggacgctgttatctgatattaagtatagccagcaatcgcttttccgtcaaactaattttccttcccctccaggcccgtgctgccttcgggacttacctgcaccgaacagtgtttaacctggggaaatctttcttctatggtatcgtggacctccttggcgattccaaaagcctgctccagcataaggcttttatctgcttcaatctccaggtccacataaatcctggaaccgaaaagtctggttttcatggaacccacccgttccacgccccgggtgtccagcaccgcctgttctatggacctgaccgtctcatcgtcacacgccttatccaccatcttatccatggaatccctgaacacatccagagctgctttgactatgaagatgcagatgatgaagctggccagcgggtccatgaccggcattcccattctggctcccaggataccgattaaagcgcccactgaggacagtgcatcgctgcggtggtgccatgcgtccgccatcagagcccctgattttaattttctggcagcagccctggtataccagaacatccattcttttaccactatggatataaccgcggcccccaaagccagcgttccgggaatcaccccgcccttttccggcccggaaccaatggtttccacagcgctcaccccgatggcgatacctgtggcaaataatacggctgacagcaaaagggccgccacgcattccatccgctcatggccatagggatgttccctgtctgacttcctggaagccatggtgattcccgccataacaatcagtgtgctgaacacatccgaggctgaatggatcccgtccgatatcatggcacctgaatgggacaggatgcccgcacccaccttaaaggcggagagcactacgttgatgacgatgctgacacaggacacctgcatggccagacccgtaccgtgacgtcttatcgctttttccaatatattcttttcatttccttctcccatctgcctttacctcccctatctatggcaatcacccaatctttcatcctgccccaaaacagaaaaaacgtctgtgggccaatgtaagtaaaccactgtcccacagacgttacggtctgctgccgctgttcgcggcccggctcccaaggctttttcccgcctccggcctgctcagtttgtactgtagattagatatgcagcgcaaagagtgtctttctacaggctaatatgaaagtctgttactgataggatatgaggaatggttctgtttggtgcggtaactattctgcattcacacaaatcaagccgtaataaaccggcaaaaaaacagccctatgcgcagaagggagcatatccgtgcccctgcaagcctgcccatgtggctgttttccattatctgaatactcagtatgtatttttcaaatacgctctaaagcagatgtttcctaagctctgccccatccgccgggctcagataagccggcgcaatgtcgaatacggtcctgcacccggactgtccttccctgctcaggcggtatgcggccctggcataggccacgatgacagatgccgtaaattccgggttggagtccagcttcaggctgtattcaatcacatggccgttctcatcattccatccggtgctgccggtgcggatgacaaaaccgccatggggaatcccggcatggtcacgcatcagttcttcctggctgatgaaatgcaccgtggtgtcataatcggcaaaatagttaggcatggtgacgattgcttcctcgatggcctttaaatcagcgccctcctccgccaccacaaaacactccctggtgtgtttatccctggtggtaagctctggcgcttttccacttctcacagccgtaagggcggcctccaccggaatggtatactgccttgcgtccttcacgcctttgattctgcggattgcatcggaatggccctggctcacgcccttgccccagaaggtatagtcactgccgcccggcaggatggcattggcatagagcctgtttagggagaacatgcccggatcccagccaacggatatgattcccacatggccgctttcctttgccgccttgtccactgcctcaaaatgccgggggatattggcgtgggtgtcaaagctgtctatcacattgaaatgtgctgccatttccggggtctgcgcgggaaggtccgtggcgcttcccccgcagagtatcatcacgtcaatctcgtccttcatggacaaggcttcctctgcccgaaaaacctttgccccctctgtcaatatgctgaggctgtccgggttcctcctggtgaacactgctttcagctccatgtcggaattgtgcttaacggcacactccacaccctttccaaggtttccatagcctaaaattccaactctgattgccatacttttattctcctttgtaacgtaatagtgtgggtttttggtttttgtagattatactacagccttctttccttggcaaatcattttttatcgccgcaccttgacgcagcgcatttattttcgctttctccggcggaaacagacaactccgcagccaatcatcacagcgcagaggacagcgcctgcataccattttaatcccgatataccagaatcttccccttcccgcacttccccctgtgacgggtccggctccgtgtccatgatttcatcctcttcccccgtctgaccggctgtatctgtatcctcccatccggcggctggctggatttgcgaatcactgtccccatccttttcgcccgggccgcgggcctccgaaggcgtggcctcttgaatcatttcctctgtggtccgtccggcggctgttcctccatccttatagccggggacggaatacggggtataggaatccctcctgcggcctccccggcctctcaccggtccctccggcgcgtcagactcctcctgcgtgcctggctgggtggaggaatctccccctgatgtactgcctcctccatacccgccgaaaccgctgccgtagccgcctgcgtattctcctccatagctgtagcttcctccgccgtatgaaaaggtgaggccctggccaacggtctccggtatggcaatctttactttgtccgtctcatagcttcctccgggccactcgatgccggccttcacataaaaggagctttcccctgactggaatctgtatatgagataaccgtccgctacaatacttgtattcagcgtgtttcctgtctccttcaggaaattttcgtactccactgtctcctgtccgctttgtgaggacgcggccgtcaccttgttcttttcctttttccaggaatgtccgctttcactgcgcagtatgtagagggcattgatatcagaaggcaggttcttaaattccagtctggcagagccgctgccgtcagctccaatattcaaaaggaccgcctctgtcagctggggctgtgtgccgccatattccggccctgtctggctctcaccgggcggaaccggctccgggggatctatgcgctcgtcacggatgtcggttttcttaagccccttgaagtcctttccttcctcccataccagcgttccctgatttctcaggatgatggccggttcatctgacgcgtccctctgtatctgtccccgtttcagtgtcaggcatccttccccctcaaccgatatcatgcttttagttcccgttataaacagattcggattgtcaatgacaacgcctgcctgggccaggtttttaggcgccaggatttttatgggtccctcaggtatcctgatttcaacagggctgatattcgtccggccgtcaggaagccccagggtaacaggtttggtaattaccatgttctttggcaggactcctatgctgtctcctcccgttaaacgttggtcgtaccattgcttcagctggtcttcatcggcaatgttcaccagtgtttcccctgtcccggcagatgtatccgcattagagccgcgcacatcggccagggctgtaaaggcagtgagtcctgtcactcccggttccccgcgcgcagcgtttacgccgcttaacacgcacagcagccacaccacggcagccagccttacgatcttcccgcctttcttcctgcctctcctctttccccccgtgtctctgtccattcttttcatcctttaagttcctttcacactgtatcacaaagggagcagctcatcctccagcaaaattccaatcctgccgttggacgacaggatgtccgacggaccggacagagccgccgtcccttttaccgttatcccggatgccctctcatggtccatgaaaaggagcctgaccgattttaccaattcaatgactctgcctgtatctgtctccatatgtcttacctcctgaagtcccataatccgggacatatttcacttaatggcctgctacagaaggattataccacagaaacagcttttatgacatatcttcatactccataagcggccaatcccgctcaatgtaaaacatatcatccatcagcagccagttggccctgaaaaaccgcatgagctgccaataaccggccccatacagattgaactccttaataaggtcaaactttgccctgatgctccttgcatcctcataccatacctcgtgctggataccgtactgccagtaccggaaatagggcgacatggcagtttcatcaaaccggatatccactccaaagtcaactgccagcttcaccgcctccagggttcccagggacctggctctggttactccccgttcaaaaggaaggggccagtcatagccgtagttagggattcccagaatgattttctcaggcggaatctcgctcactgcatattccactacctttctcaccatattgatgggggccacagccatgggaggcccctgactgtatccccactcgtaggtcatcagcatgacatggttagctgcctcccccagcagccggtaatcaataccctcatagagaagccccctctgctgagccgaagtcttaggcgcaagggccaccgtaaccgtatagccgaagatgttaaggacccgggtagcccggcgcacaaaatcagcatactccacccggtcttctgccagcacatactcaaagtcaatgtccaggccctcgtatcccttttcctgcatcgtacgtcccagctcccagataagacgctgctggttttcctggcttctcaccagggctgataccagattattgttaaagcgcccgtcctctcccaggggcgtcagagtaagtaccgggcggacgccccattgcagcgccttttctatcatccatgtgtcatcctccatgggaagaaccagatttccgttctctgtaaaaccataggaaaatacattgatggcgctcagataaggcagggtttcctccaataccccactgtcaatgaaggggtatgcataaccgctggaaaacagtggccttcgtccctccccagtctccccgtcagaaatataaagagcctggccaacggccaggcggtatgggtattctatctgatttgcccaaacaaggggctctacgggaatcccctgtgaatctgcgatggagtcaacactgtctccctgtttcactacatacattttcatgcatttcattcctaacctgaatttatacaatatatgcagcacagtcaatctttaatccaccagtctctttgccatccacttcccgctccttacgcgcaggaaggagaacaacgcgccgatagcccatcctgtaggtatggaccaccatatggcgctggaaccgataaaatgcgccagcaggtaggcaatggccacgcgggagaacaggtttaccacggagctgagcataaacgcccccatatctccggctccccgcagcagaccgttgcttacaaacagggctcccatcagtatgtagaacacggatacggtcttcatgtaactgagtccgtagctcatggcgcttccctcagacccctgtttcaggaaaagtcccagaagctgcggcccgaacaggaaaatgatactggtaatgataagtgaaaatatcaccaccatgaacatgctggccttgtatccctgcttcacacggtccattttcctggctccaatgttctgggccgcatagctggacatagcattggaaaagttcatattgggcatcatggccagggtatcaatcttagtggcagccgtgtaaccggccacaaacacctttccgtaggaatttaccagcccctgcatcagcatcatgctgacggagacaatggactgctggagcatggaaggcacgcccaccttggcaatacgctcagctgaggacatgtcgaaaaaggtaaacgcctttcctctggcttcttcctcattctccatcttcctcaggcgggcaatcaatacaaaaaaggaaaatacagcacacattccctgggaaataagggttgcccaggccacacctgccacacccatgttgaatttaatgacaaacagcaggtccaggacaatattggtcagggcggatactatgaggaacttaagaggtgtctggctgtctcccaatgcattgtagataccattcagtgaattatacaggaacaggaatacggctcccccgaaatatatcctcagataggcaagggagtcagccatgatatccgggtccgttcccagaagagacagcagaggtcccgcgatgatttccccgattcccatgataataagtccgatgacccccagcgatatgagggccgttgaaacagttatcttcatttcaagtatcttacctgccccgaagaactgggaaataaccacggtacatcccatggacaggcccgccgcaatggctacggacaaaaagaccacagggaaggatgagccaacggctgccagggcatcctcccccacaaaacgtcccaccaccatggaatccaccatgttgtagagctgctggaacagattgcccactaccatgggtattgcaaagaaaaacagcaatttaagaggttttccctcagtcagattgtttaccatatgtacattctcctactctgtgtttatattcaattgcattttcagcaatccgccgcagataatcctgctgctgcctgcgctcttcctctgtgaatcccgaaaaacaaatctcgtcccatctgccggatatgcggtgtatctcttccaggacctgatttcccctgcaggtgagacttacaaacttctgccttttattcttctcgttgataagacgccgcaccagtcccttttcctccagcacagacagatttctggcaatcctgcccttgtccaggtcaaaatgtgcgccgatatcctcctgggtacactggttgtcctgaagaaacatgatgattttcccctccaggggctgcagtccaaactgctccaactccctccggataaaccagagctcacagcgccggtatattcccgtatattgattcattccgttctccctgctatttctattgtattatacaactgttgcatcagtcaactattatacacagcatccacggatttgtcaacctgcggcttatatcccggaactatcattcccggaactttccctgagctgtcccaaagctgtcccaaaactatccgcgcccatctgatgcagcaggcatccaatgctctttcctcagaacttctgaacatgaaatttttgcggtgattccccattgcgggaatcattgttgtctgaactgttacaaaagagcggtcctgatatataggacaaacctatatgacaaaccatatgtttaaattgcaaatgtcggacatttatggtaaaatataggtaattttcagaagaaagcggggctatcaattatggataaggtagtattaagtttcatcgttgaaaaaactcacgaattaatgaatgcagcatcatgcagcaaagaggcaaaggcatcagcccagacctggctggatgcagttggcactgagaacgaggccgcagcaacaaaaacatacattgctgagctggaaacagacatcatgccggttgacggcctgattggttttgctgaatccgatatgtgcgcccaggtcttcggggcagacaaggccaaggacgtggcagcccatgcaaaggaactcaaggccgcaggggcaaaatactgtgattgtcctgcctgcgcagccgcagaggcaattcttgaaaagaaggatgacattcttaaataagaatatcgtttcagacatgcagtatatcaaaagagcatccggcagaaatgacggatactctttttttggcttcgcggcgatgcaggaacttcctcattgactttccgacgcatgtgtcgtatattaaaaacagacacgaatgtcggaaataggcaggataaaaggcaggtggtaggcccatgggcaaaaaaggggacaaaacaaagacagccatacggaaagcggcactggttttatttgtccaaaagggatttaaggatgttacaatgaaagatatctgtgaggcagcaggacttagccgcggcggattatatacgcactacgggagtaccggtcaggtatttgctgacatcataaatgaacttatgtcgggccttaaaagccaggttgctgaaaagatggaaagggacctgccggcagccctcatattggatgaattattagagcgttaccagtccgagatgcttgacaggagcggttcgttaggacttgctttctatgagtattacagcggcatgccattatcagaggacaacgccatgctgaagcagtattacatttcaaagacaatgctttgcagcctgattaaatacggcattgacaaaggcgagtttaagcaggccaatgtaaacgcggttgcggatttgctgctattctcttatcagggcgtacggatgctgagcagtatcatgccgctggacgacgataatataccaaagggcatgatcagcgaaatcagggcgatgttagtaaaataaaaaatgacgccaggaggtgaacacggatgaagttgaagattgtaggaagcggcggaatgtttctaattcccaatcctttttgtaaatgctctgtctgctatgatgcggatgttttaataatcgggcttgtttccgacgacggcatacttaaagacgggtcaaaacttgattccgcacctttcagagacgatatgttcaccttggatgagatgatggagatcaagcgcgcatacaggataaagcgcattatcattactcacattgatgagtattggggcaaatcctatgcttactaccgggaatttgaaaaaaaactggacaatgtatcatttgcctatgacggcatggaaattgtcttatagccatcccaggtctggcagaagccggccaaaacctccctgcctctttttttcttgccgcatgaggcaggtgggaacggaaaatacatataaaaatcacgtgcgcccctgtctgggctgcataagtaagcccggccatgaatccgtaccctgccgcagttaaagaccaacttccctattcttcaaacgtccccttcataataacttctttatcccacacagccttcctgcctccggccatgacgtggaggatatccatggaatcatcgtacaccacaaagtcagcgtccgcgccttctgccacggtccccttgactccagtcagtcccagcactctggcagggttcttcgtcagaaggttcagcaccttttccaggctggctcctctctcgcacaccagcaccttcagctgttcatgcaggcttttgggcgacgcgtaggtaaggccgatgcattccatcttttcattgaacctgggcgcgcttccgtatgcgtcgctggacatggtcatgttaagcccctccgggtcctgcttaagatagctcagaatctggtccgccgtctcctccaactcctcccttgtaagtccggccgtcatatcaatggttccgccgcgcttcacaaattccaggccctgctcaaacagctcccgggtgcgccccatatgggttggaaggaatttctgaacgggcacatcgctgttgtcgattgcatagaacagaggatccagcctggcctttccgcttcccatatggatggtcacatagccgcagcacccggagagcataccggcccttcgggcctgggttgccagtgaaatcagctgttctcctgtcagattggagcttctgtggtcgctcatggcgattttaacacccaccatcaggtcaataagagctatatcccgctccacgctccctgtgatggtgggggacgggtatccgtatgccccggtgaggatacggcaggtgattccctcttcattgaaagcccttgcctttgccagaaggttctccaggcttctggttatcccgtctgtgcccaaaagtcccaccaccgttgtaatgccgtttcggaccagcacgctgaggcttgcctccggcaccctggtggcgggtccgctctcgccgcctccgcctgttatatggacatggatatccatgtatcccggcgtcagaatgcgcccgcccaggtccaccttctccacctcctctatctggtcgtattcgtctatgtggtccgctatcctggctatcctgcttccttctatcaggatatccttcctccccagatgctccggcgcatatatatctccctgtttcaatactttcatggattcatttcctctctttcaacaaaatcatcacagcccggccgtaatatacatgtgcctattatattatcaatatagaaaaaaagaaagtgcctgttgacggttacagacacttttcatgaaactcatataacttttaataaggcttcccgctcacgccaggcaaatatcagtccaggtgcagcaaggcctctgccagcgccaatatggtcagcgactgcccataagccatgggtgcaatcaatatattcttatagtggtccgcgtcataccccatgccggtgccgccggacacattgagcacagtgccgtccctgtcaatgctgtccagaatggcttccactgccttccaggcgcagggcagataggaatcgtccaggattccgtaccggattcccttgagaattcccgcggtgatggcggcgctgcctgacacttcctcatagctgtccccgtcggtcagcaccgtgtgccacaggccgcttttgccctgaagtcccttaagggcctccacctgggccttatatgtatccaccacaaactcctttacaccggcattcatggtacccttaaacatatcgatataatccagtattcctaaggtaaaccagctgtttcccctgcaccagaagataccgccgaaattattcctttcattgaaggtccatccatggtagaacagtcctgtctccttatcccacagatacttgatgtgcatcagcacctggtggatggactcgtcaatccatgactggttctggtatttctgccccatccggttaagaaagagcactgtcatgaaaatggtgtcaatccacatctcgttttcattgagcctcactccctgacggtccccgttggcgctggtcacatgctggaatcccctttccatggtcctgggcaggcagttcatgagccagtccgcccatttaaagcacagcgcttcaaattcctggtcgtgataatactcgttaagctctgccagggtgagaaggggcgtggtggtattgatattttttgagggaaggccttccctcatgttgtccttgaaccactggtacaggaactccttataatcttcgtttttccgggcctgcatgattcttaacaggccgtacagtcccacgccctggggccagtcccattcccggattccaaaatcccgtttgaaaaagccaatggcctcaccgccctcagccagctcctccccgttctccggtccgcccagattcatgagcttttcaatgacaaggtccagcttttcctgcactctctttttatctgccgtcctcatttttacactcctcattctgatttcctatcctcctattttaacaatcccaggacaccgggcagccacatgctgaatccgggcacaaaggttatgaacatcaatgccgcgacaatcgctgcaaagaacggaagcagctttttcatcacgtcctccacctgcagtctggcaacgctgcaacccacaaaaagtacatttcccaccggaggcgtgatggtgccgatggacaggttcatgacaatcatgacgccaaactggatggggtccattcccagactctttacaatgggaaggaaaataggcgtaaatatgagcagggccggggccatgtccataaaggttcccacaatcagcagcgttatattgatgattaacagtatgacaatccggttatcggagattcctaaaagcaggctgctgatggcctgcggcagtcctgtgaaggacagaacaaaggacagcacagaggacgcgccgataatcagcatgacgatggcagtcataaccgccgtgtccaccagtatcttggggatatccttaatctgaatactcttataaacaaataccgacaaaaggaaggcgtacacaactgccacgcccgatgcctcggtgggtgtgaaatagccggaaaggatgccgccaatgatgatgacgatgaggaacaggctgggaatggcctcccatatggtctttacaatgacggccgcgctcatcttatcccgcttcatcacatatccgtgctttgcgccatagacgcaggccactgccatgcaaagggctgcccacaaaagtcccggcacccagcccgccatgagaagggccgcaacagagacgccgccgctggcagctgaatacacgataaaggaggccgtggggggaatcagctggcccacaggcgcggtggttatgttcacggctgctgaaaaacccttgtcgtatccctgctcctcctccagcggaagcatgacgcctccgatggctgttgccgccgcaatgcctgagccggatatggaaccaaacatggcattgcctgctatgttggtcatggccagggagccgggaaccttgcccagaaaaagcatggccaggttaatcagccgttttgctatgccgccgctgctcataagcagtcctgccagcacgaagaagggcacggccaaaagtgtaaagctgtcgatgccgctgacaatcttctgggcagagacaaacattccaaacccgggagtcagaaacatgatgatggtcagcagtgacgctgaaatgatgctgaatgatacaggtacgctcatggcaagcatgagaaagaataccagaaccagaacaatggctgcctgaatttccatactatttttcctcctttaattcctttgtaaacatgatgagacgctgcaggcagtataacaccatcaaaacgccgcttatgggtacgcagatgtaatatacctgcatgggcagttccatggccggtgatatctgtccggccgagttaagggtcaccatgatgcctcccgctatcatcacaaagacgctgatgaacaggaccagaaattcgattcctatttttgtcctggtcaggttctttggcttaaatgtcctggtaatcaggttaatggacaggtggctttccttgccgtaggcatagggcacccccagcatggtaagccatatgagcatgtatcttaacagttcttccgtatatttgctgggattgtgcagcaggaagcgggtgattacctgccagaagcaccccgctaccataagcgccgccagaaaggccagaacggtttccaggaatcggttcaatattttcatcatcttgttatcccccttttactctgcatacttctggatatcgtcatacagggctttatagctctcgccctttgcacagaatttgttatggatgggctgtaccgcctgtataaacgcagtcttgtcaatgtctctgtaaacgtgcacgccgttggattcagcctcttccatggcctggtccatcattccgttgtagagccgcttgaagttctcgttggtcttttcaaatccctttaccaggtagtcctgctgctccttcgtcatacggttccaggtcttggtgctgatgatgtagatgtccggggaatactggtgctctgtatatgtataggatttcaccaaatcctgatgaccgtccacggtaagggccagctctgtattctccgctccgtccacgattccctgctgcagagaggcgtatgtctctcccgccgccatgggcaccggggttcctcccatggcctcaatcatatccatggaggtggtgttgggcatggaacgtatcttcttgccctttaatgctgacggttccacacagggcctgtcttccttcagatagaagttcctggcgccattggcatagtagcctacggctatgtagccatcgtcctccgtggacataaacagctctttcaccttctctgatttctgcatggcatcgtaataatgctgctgcccgttaaaaagatatggtacggcaaaaatggagtactcttctttaaactgccccagggtgttggagctgacctttgccatgtccaggattcccgccttcaccatctcgatgatatccttctctgtcccaaggacgccgctgggataaatctgcacctccatgttcatggacgcatcctctgccgtgatatctgatatcagggcaatggaatccgctatctcggagccggccgcctggttgtgggccagtctgattaccagcttgtcgctggcctttgcacttgtcacccggaaaaaggtcacacatattacggctatacttaaaagcgctgccgcgataccgattgttttcctgcaagatttcatgttctctctccttttcatacgtgattcatactgaatttgctgctgtgcttttgtttgactagattgtatcacaggaaggcggctgtttcttattccctgttgcagtcttttttaatttttcaaactatattgctctcctctgttgacatgtctgcccttatttattacaactatactatagatggatacatgggaacaggaggatatgaccggcatatggaaaaagttacattttacggagagattgagggcatttccctggaacagatggtccggtacggcaaatttgacatgcgcgtaaagcatttccacaaccaatatgaaatcttttatatcattgaaggggaacgccttttctttttcaataacagggaatatgtggcccgctccggggacctgattctggtggacaccaaccttattcacatgacaaagtccgtcacagcggaggatacgggccataaccgcgtcatcctgtacgtcagctatgacagaatgaaagcatttgacgggcagtatccttccctgcagctggttcggttctttcatgaacactacggagtctaccacctggacaaggagcagcaggccctgtttctcaatttctaccgcaacctgcgcattgccatgactgaaaaagcccataattacaaagttggcattggtcttgagacccttacgtggctctttaagataacctcctatgtgtcaaagcaggagggcgccagcccccactcctcagaccatcccaaataccgcacagcctacgccattgcagactatctgtccgagaactgcgaacagaacatttccctggaggagctggccgcccacttttatctcagcaaatattatgtctgccgcacctttaaggagattacgggatacacggtcacggagtacaccaacatacaccgcatccgcaaggccaaacgccttctggaggaaacggacatgagcatctcgcagattgcccatgagctgggttatgaaagcctgacctactttgagcggatgttcaagtccttcatgaccatttcccctctaaagtaccgcaagaccctgaacacagtgacctataccaatgaacagaccacagaatttgaggaggacacagagcggctttcctctcaccggcagccgtatatccaccacaactttgtatgattttcttcatgcaatcggataggggagattttaacctccccttccacaccacgtagcgtaccgttcggtactacgcggttcaatagtttactcggactttcagatagtgggcagtcatatcgggataaccaagtctgtccactatgattcttttggtgagtgccgagttgagcattcccgccgctctccacactccctttcggcagttcgccatctcatgcaccttccactctggtaaatgtaacgcccgcaacattttatatcttgtgcgtaccttcttccattgtttccagtacaccgctcggattctgtggcgcagccactcatccgtctgttccatcaggcttttcatgtctgcatatcgataatagttaatccatccccttgcatagcttcggagtttttcttccctctcctgattgctccatttgttccctctggttgtcagctcccgtatccggttcttcatttttgccaccgacttcgggtgtatcctcatgcggcatttccctttatgccggtaaaagccgtagcccaggtattttatcttgctgacgtggctcactgtcgttttctgaagattgactttcagaaacagttttcctgtgatgaatggcacaatgttttccattgtcctctctgcgcttttcctgcttttgcacagaatcaggcagtcatccgcatacctcacatacttgtgtcccctgcgctccagttccttgtccaactcattcagcatgacatttccacataagggacttagcgggcctccctgcggcacgccctcggtcgttgcgtgaaatcctccgtcctccattactccggctttcaggtacttgtgtatcagcgagattaccctcccgtccttcaccgtcctcgacagcacctctatcagcttgctgtggttcaccgtgtcaaagtaggattgtaaatccatgctgaccacgtagacatatccttcgttgatatatttcctacatctttccagtgcgtcatgcgcccctctgccgggacggaatccgatgctgttgtcagagaactgttcttcatataagggcgtcagttcctgtgcgattgcctgttggattaccctgtctaccactgtgggtatccccagtttccttgtttttcctttctcctctttgggtatttctacccttcggactgggtttggcttgtatttgccttccctcacctgctcgaccaattcggactggtgttctctcaggtagggtagaagttcatccacctgcattccgtcaatcccaccaacgcctttgttcgttttgaccttcttataggcggcatttagattgtcgcttctaagaatcgtatctagcaggttgtccgtccgaaagtccgtgttggtgtcggggttcccggtaatcctttcatgggcgtactctcctgtttcccttccctgttccgcaggtatctctcgcaggtagtcctcaatatgaagttgtctgtacttaattccatgtccggtttccatttggtaacgacacctcctactgttcagtccttcccggtgcgtttgcgaccgcccggtactatgacctctgctgacttctcacggcaagctttactccgtgacagcgaatgttttatcgccactttcacgtccgtgagacctccccgggtactcacacgttctttcccacttatacctgccccgtttactgctggcgttccgtgcagttattggactttagtttgttaggcaacctcatccacgcttcacagcctatccggacaacttttacaggccagtggtttgcctccggcttccttcagaccccacctcacgatgacgcccttgccattggctgcacccttcccactgccgggcgggtcagggactttcacccgttagaacgtgcgcccgccgggcgcacccaaaagaaggagcgtactcccctttcaggaacgctccctctttctttattgcctcagtgctgcctctttaatcttcccgattccgcctatttctcgtacaggaacttctcaggcaggttcacatggaaatccactgccagatttctgaaatcctgtggtgtgatggtctggagcttgtccggacggatgctcagcacctttaccagaatttccgccgacttctcaatggtatgcatcaggccaaaggtcaaatcaaagtcctcgcccgcgcagaacaggccgtggtgggcccatacagctgcgtcgtactcttccatcagcctgctggtggccacggcaatgtcacggccgcccggcaccatccagcccaccacgcctatgccggccggaaataccaccgggcattccgtggccatttcccacagttccctggtaaacacctcgtctgtcagcggcaggacaaaggtcagtgcaatgatgttggccggatgggcatggtaaatcaccctgtatcttccctctgttgccttcatcttcacctcatggttcatcagatgggtgggcagctcgctggtgggcattcctccctttacaagcccccagcagatgcggtagttctcccctgtctggtctacttctatgatgcagcagttggtctccggttccagaatcatgttgcgcataaacctgccgcttcccgacaccatgaaatactcccctgacagggcaggaacactggcgccgacgggctgccacttcccgtcataagaaagctcctccttcacggactccacttcctccggtttgatgcggtagcttaagttgccgccgttcctctcatgccagttctggttaaaaccatcatcacatacacgtatgaagccttttgcaaaggctgtgtccaataccttcattttctaatcctcactctctttcttttgctgagattcattcttctgaatttatgttacagggcttaaccgtctccggctccttgaaccgtattatccgcgctttgagagcacttccttctcgtaggcttcggcttccttaaaccactgctccttcaccggaacctggtttatctggcagaaataatcccatacgtccccaaatggatatgttttaagctcttcctgctccattataagctccgtaaacctgcgctcctcctgaagctttgcaagcttctcatttggcatcagcagggcgtataaaagggccttctgcatgtttctcatgcccaccacccatgcgcagattcggttgatgctggcgtcaaagaagtccagggccagaagcactctgtccgggtcattcctgacgatttccttggcaatctcccttgtctcgtcgtcaaagagcaccacatggtcgctgtcccagcgcacgggacggcttacatggagggcaaccttgtctgaaaacagcagcatggaggatatcttatcagatatcatttccgtggggtggaaatggccgctgtccagcaggcacatgattcccctggcggccgcatagttcatataaaactcatgggagcccacggtacagctctccatgccaatgccgaacaccttggattccaccgcgataagcaccttgctcttgtcgtaatccatggacagaatctggtccagggaatccttaagcctggccctggggctcatgcggtcagccggaatatccttgaagccgtcgggaatccagatattcatggagcagggacttcccagctcctcggcaaagtactgggaaatgcgcacacaagccctgcagtggtcaatccagaattttctgatttcagggtcctcactggacagggtggcattctcagcctttggatgggagaacatggttgggttaaaatccagtcccagtcctctcttcctggcaaactccacccactttgcaaaatgctttggctccagtgcgtcgcggtccgctttttccccatccgtgaaaatggcgtagctggcatgaagattgattctgtgcttgcccggaatcaggctcagcgccttgtcaatatccgccataagctcctggggatttctggcctttcccggatagttgcccgttgcctggatgccgcctgacagactgtccgcgccctcaaatcccataacgtcatccccctgccagcaatgcatggagacagggatgttcttaagccgctccactgcagcgtccacgtcaacccctaatccggcgtaaatttcttttgctgattcatatctttcctgtatattcatggttctctccttttcaccatcaaatcttactcaaatatcggtcaactgttaattcaaatgaaacactggtacaaaatccacgcataccggactgttatctgcacgggtttccatgatgtcagccatatagtcccaccatctgcggtttatgggcgtatctgctgatttggcccagagctcctcgtcctccacctccagatacccatagagcacattggtttccctgtccagaaaaatgctgtaattatgtccgccgtactggtgtatcatctctttcatctcaggccacagctcattgtggcgcttctcatattcctctgccatacccggattgaggaacatcttaaatcccttccttaccatacggttctctcccttcatcgaatccttcagcgtaacagcccgggctgttaccatttagcaaaccttctcagacggttcataggtctttatttcaaatgagcggaaaatgctgtccctggcctcctcaaggctctcaaactccttcccctctatcatctgcaccgccagattgccgatggccgtggcttccgtgggccccgcgtatacggtctttcctgtggcctttgccgtcaggcggtttaagtagtctgcgttggccccgcctccaacgatatggatgcagtcatagcgcacgcctgtaagggcctggatttcccggcagcagatgcggtagcagtccgccaggctgttgtaaatcacagccgccatctcccacttagtctcaggaacctgctgtccgctctcctcacagtatgccttcaccgcgccgcacatgctctcaggagccaggaaacggctgtcattgcagtccacaatggaggaaatggtttcgcgggaagccctctcgcatatctcgccaaaggagtaatcctcccctgattccttccactcctttctcacggactgaatcatccacagccccatgatgttcttaaggaaacggtacctgtactcatatccgccctcgttggtaaagttggcctccatgctcacctcccggcagtcagcgtccttaagctctgtccccatcagggaccatgtgccggagctgatatagagtacatggccgcggttgaacggtacggccgccacggcggaaccagtgtcgtgtgtggccggaagcaccacccggcaatccagacctgtctctttcctcacatcctcactgagccttcccaccacggttcccggcatggacagcccgccaaaaagcttctgcggatatcccagagtttcaatcagttccctgtcccaggtacgttcagagggattgaccagctgggtggtggtggcattggtgtactcctgtttctttaccccggtcagcaggaagtttaagtaatccggtaccataaggaagctttccgccttggaaagaatatccggctgtttttcctttacagccataagctggtaaaccgtgttgaaaatctgtttctgtataccggtcctccggaacagctcctccctggaaatccgttcatatacctttaaatccattccctcggtgcgcctgtccctgtagccggccgtcttgcccagcacttgtccctgtttgtccagaagtacaaagtccacggcccaggtgtcgatgcccatgctctccgggttgatacccagttttttacattctctcattccagccttgatttcctcaaaaagcccattgagattccagcacagggtaccgtccaccattttcattccattggaaaaacggtagatttcccgaagtttcatctttccattctccatccgccccaggatatggcggccgctggacgcccctatatccaccgcaagataataacggttcactgtcctacctcctcgttatgagcacttagcgtctgtcctttagacgcttacgtgcgatacatgtcactggcacttagcgaggtcttttacgagcttagtgcagtgactcattgcttccatgatataacagataaagcaaaaaaataagaacgtcatttatgaaaaaatgcgtccttatttgcacataaacacaatttgaaaccgaggggcatttcatccccgggatattctatcctgtctttctgtactccctgggcgacataccgtaataggtcctgaatatcctgtaaaagtagctggtattgtcataccccacagcaaagctcacatccgccaccggcatacgcgtattgtgcaggagaaaagcggcctggttcagccgcttaatctgcagcagttccttgtaattgcggcccagcaggcggtttatggcccggctgagccagtacacgtcatatcccgtcagggctgccagctctgtcaggctgccctcccggtaatgctcgtctatgtaacgcagcacctgcagggtgagctgctgctcaaaggattgtccgctgtcgcggtttacccggatccgtcccgtataatgcatgagatggcgcagcagcaggcccatggtggtctggttcatggcctgcattccctcccgctcatgcataagggaccacaccaggttctccaccaggttctggaccggcagcacatccgctatctggaaatgaagatagcgtccatacctggtatcatcacagagacatcccacaataaaatcccgcagcaggttctcctcctcccccatcatacggaaggccgtgtcaaagaattcaggaagaatgatgaagttcaccgaaatgtcctccagcccggcagactggatttcctggaccgcgtgctggtttaaaaacagcagctccccttccttaagcttcagctccctgccgtccaccacatgggtggtctcccccctgcacatgtagattacctccacatagttgtgggtgtgctccggaaaatgaacgaaacgggtatggggacggatggtaataagctgtccggcctccagcagcttatcgctgtcaatgaccatgtccccgcggtccatatacagggttctgtcaatatccgaactgcctcccagtatcttctgttcttcttccgtaatgacacttaggctttgaatcagctcctggttcatgtaaatcccctttctgtattggagaaaactgataaaaagcaattttcagacacacattagtgcccccggcgtaaatacgccgggtaacactagaacgcgaagtcccgcagaaatgtatgttcgaacacatcctctgtcactgcataagcttctttgtaaatgtatccctcaagacgcttcatgaattcaggaagataatgttcatgtttcagtctgtggttctttaactgcatggcgtgatgagggtttaatgtcccacgaaaaaccaatatatatctgacatgggtccgaaagaattggattggattaccataatcaaatggaggatattctatgtttttctccttcattgcatacaagacatccatcaccgcataaacattagaataagccttttttaacacacctgttttagcgttagacatctttgcatccttgaattcaacgaaataccattcatcacacttattaattaaaaaggcgtcagccgtattgattgaatcagcttcactcaaagaatccggtaaaattattttccggtatgccttttttgcaaagatatccatatccattacccggatgtcactgtcaaccaacgaaaccttactctcgccgctatatgatgttaaccgcatatccgaacatatttctaatgaaaacccatgatatgacatatattgattcatgagtttcataaaatcatcaaatttactcatcctttgtatcttccatctgaaatttcaatttatcaagtgcaatactggcgtctactagttgagaaagcatctcggctgggtcctctgtcacattcttaaatctacaccctgattcagatatttcagacaaatagtaggtacacttatcgtccctttcatacttctcagcataatactgcaatgcctccacaaaatgcggactatgggttgtaagtattatggtaagctcaaatactttctgcaaaagtacgataatctccgcataacgaagctgccaatccggatgtaaatgaatttccggctcatctaaaataagtacatccttctgtttcaggcttccattttccaataaggtttttattattacaaacgatttcaaccctgtggacaggttatttatattcaacctctcaccaatttcacgctccttataataataggaatggctctcatccattaaaagggttcccgatgatatctggttgattttctgcagtacctcctgtactttatcttcaatcagctccagctgtacaatatcctcaaccacatcagactttctttgcagttttttaattgtattcctttccgtttcatccgttctaatcagaatagtattcaaagaatccagtacaaaaggattatccagatagactgcctcgttcaatatattcacttgctgccgcaactcagtacaattgttatttgaaaatataatcgaaatagtcttattgccaattaccgcatcaatcgcagcactggctgatggctgataaatattatttatctccgaataaaaaatacgattgaaataagctgacactaccgattttgtcaatctctctatcggcaaatgtctgatcctgtcaatttcaccgttaatgtcctctaaagtttcatcttcatttgtttttttatcttttaacataccagcaaattctttgaggatttgttgcttttcttcctccgaatccagtatggcaagttcttccgcatagcgtatcatccggttatgaaatctggaagccgaaccaaaatacccgtcactctgcattgatatatcttccatttttctcttcaatacctgatatattaaatcccgtttctgctttacgattttttcttctaagtttaccaatgaattaaacaacgaaaatacaatcttgccaatcgtactttttcctgtattattattacccgcaatgatagtgattccatttaactccaggtccgcttcttctattttggcaacattcctaattcttaatttcatctcaatctccttgaacggcgctgtcattttgcttacaaattagtataacaaaaggcagacactttgaaaagcctttccttttatttatatccaaaattcggaatcccattccacctgcgcctgaggccatgggctgccagcttgggagtacgatccctggtaaagattcccttgcggttgccgcccacacgcatgggcccttgtaccgttacaaagtcagcgaaattccatatatgttctcctatgaagaagggacgtttatcattctcacagttaatccgctcatagtactggtcctggtattcctcactgaacattcccggcaccatctgatggatgcccgccactgcgtcggccccgtattccgtcagcataacaggcttttcctgttccgcccagaaatccagttccatgttccatccattacaggcagcatccaggtcgccgcccaggttataccagccatagtagcggttcaggcataccacgtccatggtcctggtggtgatatcctttgtgtagtcattctggcagcacaccagcgtcacaggacggtcctgggggtcctctctgtgggccagctcatagaggggatgccagtagtcatatgcctcctggggatagtgctccagatccggctcatttcccaggctccacatcaccacgcagggatggttcttgtccctcttaatcaagtcctttataacctgctcatggtgttccccggtgccgcaggcatagggatttccatttccgcccatgttcagccccaccgcagttgtctcgtcaattatcacgattccctcacggtcgcacaggtcgtacatctcctccgcatatgggtaatggctggtgcggaaggaattggcccccagccagtgaatcaggttcacgtcctttacattcagacagaggtccaatcccctcccccggaaaaaagagtcctcatgttttccgaatcccttgaaataaaaaggctttccgttgagcaggaactgttttccctttacctccgcagtgcgcaggccaaagggctgttcatacatatccgctccatcttcccctgtcagtgtgacgcgggcagtatacaggtagggtgttcccggccatggctcccacaggcgtggctcccggatggtcatggttcctttacttccccgggagcgggcggccacattcccctcccggtcaaggacctgaacttccacatctccctgtccctctgtctctatcttatattccacgtttccttccagatcaggcaccagagtaatgtctttaatgaactgccggggcgtggtgtagagatacacgggtctgaaaatacctgcatagttgaaaaagtcaaagtttgggcggttctgcagcttctgctcccgcttggcctgctccacgcttggaatgcccgcattgtcagaaccgaaaaacgctgtctctgtggggtcatttccggcaggcagggtggaatggtccagccggttatccactgcaacggtgagaagcaggctgcttccaggctctgccaaatccgttatctctgcctcaaagggcagaaatccgcccttatgggtacagagcagggtatcccccagccacaccatggcactgtgggccaccgcgccgaaccgcagccacagtctctgccccttaagcagaatgggcacggtaagcgtcctctgataataggcccacccataatggtccctgtattccattacatccttctggtcattgtagctggccggcaccgccacaggctccccgtctcttaagagtccaggcatgggggcccgtgccgcagaagtctcctggtccagcttaaaattccatattcctcccagttcaacggccatgcggctttcattctgtctcacgcttaacatggtgatatcctccttatctaataatccaggactgttccggccaatgtttccctggtccggtcaaatacgattatggttccaaatcccatacagccctctgcctccaccatatccgtaggggaattcacctcctggtggcagattacagccacataatcccgtccattgcctttcagtctcactgcttccgccatggaatccggatatgtgatccccttaagagcagactttacaggcaccttttccacctcgcagggcctgtagccattctcgggaccgccctggatgaccgtcagaagggaggaaaatcccttcctgtccgccttcaccgtgatacagtccctgtccacggccctgttataatccctggcaatacggctggcgcctttttctgcctccagcccgcttcccagaaaggaaaacagcgcacgggtatgactggtccaaaactctgcttccagagacggccctgttcctgctcctgtttccgccgtgtccgcagcagtccggccctgcccgcgtttatccgctgcccgcagcgtaacccggcctttttcactgaaatgccagtactgtctgtattcgtggcttccccctgtgtacagctcatccgtcacaatatagatatcaggtttgatatggataatcctgcggtttaccgccactgcgtcttccctgtccatgtatcccaggtgagcgccctgtaccagctcgtattgttccgtaaatcggtgctgccgcttcacgggagcgcagagcttggagcactcccaggaatccctgcacacggtaaaaaaccggttgtccacagtgatggtattgtgggccgtagggtccttaaaggcgaagcggtccggtcccggcacataggtaaaccggcctgcgtctgtcagcacatcctccccgcctataaccaggtccacatggagctggtctgaatgtccgtgtcctgcccccatggtcccgcagtggaagtgaagcaggtttccctcctctccccatccgtccctgaggtagtaatttccgctgtcctccagggcggctgactgaaactctggcatggcggtttccatgtcccggtattcctttgccgcccggattcccagatcccatgccatgtcatactccaggcagggcgatgcgccaaatttcagtaccgggtcgtgaaacagccatgctgccgctgaaatggtgtcccgtatatccccatcatcgctgtcgcccatcaggaactgcctgtggtccggttttttccaggcaagattggcataggccattttcctgacagcggaccggatggactccggcacatggatatggtttctctgagccagaaccagcacatcctcgtagcagtgcagcacctcattgtggtaagagggcgactgttcccactgtaccccgtcccccataatctgaattcttgcctccatctccagatgggaaagggcagtgtccacataccgtttcctcagtgcgtcatccggcatggcaacgcctatttcaaagagaccatggttttcaatgacaccccagttgcttatgtagcggtatggggaatgcatgcggataatgtactcggcatgctgaatcaggcacttataaaacgcgtccattacctggtctgtcagcgcctggctgtccttaaaataccagatggccttgacccagaactcccctctgaaaccagcctccaggattctccatgtggtattttccgtctccggcgtcagcgtctgtgtgccgatccagtccataagcaggttcacaaacgttccggcgtacttctcgtccccggtcatctggtaagcctgacctaagcagataaagaacctgtgacggttaaactggaaaatgaattccttgtcatcccctggcatatacccccagtcaatccttccctccggaaattccaccggctcccaggtcctctccaggtcctgttttaagtcaaagagaaaagagctccggcacacctggtctgccaccctgaggatgtggctgcattctccgggccattccctcatgcagtaatccgctatggcagccgggtcatccatgaacatggtcccctgttttctgtcaaaaaatatctgtttcgtcatctgtgtcattccaatctgagccatttcaatctgagtcatttcatatacctctcttgccgcgccggatttaccagtagggattccagtccctgcatatcctggtcagggcctccatgtagaaataatccccccacagattgcactcatctaccccatagtgattgcaggtattgtagggcgaatgattggagtaggtgctgtggagcacaaggccgttggacttgctgtaatccttcacggcataattgtcggccagggatttcatcagccttcttgccataccggtgtatccggccccctcgcccggctccatgtaacgcgccatctccaggagaccgcaggccgcaatggaggcggccgaggaatcccttggctcctcatccccatccccaaattccaaatcccagaacggtaccaggtcctttggaaggcgcctgaaaaaataatctgtcacgcctttgaacagattgacgtaagacggttccatggtacacctgtatccaatggccgtaccgtagataccccaggcctggcctctggcccaggcagagccgtccctgtagccctggcaggtggcgccatggtccggctcccctgtttccctgttaaagaagaaggtgtgccaggtggaaaaatccgggcggattacattggccagggccgtgcggatatgggcctgggctatatccctgtatacggacttccctgtctcctgagatgcccagtaaagaaggggcaggttcaaaagacagtcaattatcagcctgtaattgtccggggcatttaaaggaccccaggcctggatgaactgcccccgttcatggaaccgtgtggtcagctggtcagccgccttgacggcagcctcccttcccacgccgctgcctgtcagtttataaccggccacgcaggagggcgagtacatgaagcccagatcatgcgtctccacatccgtcctttcattgattcgcttcagaaagctttccatctgaatatcaccggcagcgcgcaggcggctgtccctggtgtattcgtatgccagccatatctcgccggtccagaatccgggcgtccagtccacattgtccgcgggcggataaaatccgttctcgctgtaggcccgggggaaccggctggtaaaccggggcaatacccgaagcacctgcccggttgccgcttcgagcgcctccctggcctctccttccgttatctccggcatatcagccaatttgtccatatcaatccattttttcatcatgtctaccccttcacgccggtggctgccacgccttccacaaaatacttctgaagtgaaaggaacacaatcagcacaggaatcaggctcaggacagatgcggccatgattaatccgtactcagaaccaaactggctgatgaacatgcgcagtcccagctgcaatgtcttttttgactccgttgtcaggtaaatgagcggtccaaggaaatcattccatgtatttacaaaggtaaatatggtgagcgtggaaagggccggtttcgacaacggcagcataattttgctccagatgcggtattcgctcataccgtcgattctggccgcctcacacagttccgtggggattccctcataaaactgcttcatcatgaacacgccaaaagccgaaaacgcctgcagaaaaatgatggacaaatgggtatctgccagtcccatggaacgcatcatcatgaactggggaaccatatatacctgccacggcaccgcgatggtggcaatgtaggccataaacagcagttcctttcccttaaagctcagcttggcaaaggcatacgcggcaaagctgctggtaagaagctgtaagaaggtgacaatcaaagtcagcttcacagtgttaagcacaaatttccccagaggtatcctggtccagatatccagataattctgccatctggggttggtgggaatccactggatgggaaagatgaatacgtccttatccagtttaaaggaagctgaaagcatccacacaaagggcaccagcatgataagggccatggctgtcagcacgatgtagagaaccaccttaaatatctttgattttgtattctgaactttcattccggctctcctccctaattcgcatattttttctcgccgcaaaactggaccagggtgatggccagaacgatgaggaacagcaccatggcaaccgcgctggcatatcccagattccagttgcggaacgcctcttcgtagatatggtacaccaggacaatggcggattcgttcagcacgccggtgttgcctcctgccagcatatacacaatgtcatacaccttgaagcagttgatggtcagtatgatggtcacgaaaaatgtggtgggccgaagctgcggccaggttatgtagcaaaacctctgccatacattggctccgtccaggctgcatgcctcatagagctctgcgttgatgccctgaagcccggccagataaatgaccatatagtagcccatgttcttccacactgaaaaggtgatgaccgtaaacatgacccagtccttgtccgccgaccatttggggagggatttggcggcaacacccaggttgtataaaatcatgttcacagggccgctttttgccggggaaaacagcatgttccagacagctgccaccgcaaccagcgacgccacgtaagggaagaagctcacggtgcgcaagaaattccttccccttattttctggttcaggaccacggccagccccagggcgacggccagggtcaggggaaccgtggccacgcaatagatgattgtatttctaagggatgccagaaaacgcgtatttccaatcatcttggcgaaattatcaagtcccgcaaactggatgggactgttcccgtcccactgcagaaaagccagcacaaaggcaaatataacaggtcccagggtaaataccgcaaatcctaagaaattaggcgctatgaaggaataggccacaaaatccctcttggtctgacggctgaaccgctctcctgtcttggcctgcctgattttatcctctgtcttttctatttttttaatcagctttttcttctgcttcggatcctttgcctgctgtaccttaagctccagttcttccagctgcggcctcaggacagccagtttcctttcggcctctgccgggtcggttgttgttaccttggccatatcgctcctccattcctcatgttcttctttctttaaatgaggcagacggttgatgtcccgtctgcctcctggtgaatcctgtttgatgtgatatgggcctactgtcccagtacggccgccaccttctgttccatgtctgcgataccttcgtctacggtcatgttgccggtcatgatgttgtcatgggcctcattcagcacgatttccacctcagaactcttggcattgacaggcatctccagatagagattggcagtctgaagcgcttccctgctggcatcatctgtggggaatccgctggtagatgccacgtcacttgcaatgtcatccgtcatgatggcagggaaattgcctgtggacgccaggacctttgccccctcttcaccgcatacgaactgcatgaacttccatgccgcatccttgttgggagcgctggcagggatggccagggatgtaatctgggccgcggtggaacccggctccacgccctcagcatgagggtacttcacaatagcccaattcgcgcagtccgcgtactccccgcttcccaccttttcaatcagggtggaaatgaaccatgtgcccatgttcatcattccgatgtttccctgtgaaaacgcgcctgagtaatggagattggatgtctttaaggttgcgtaatcctggcagattccgtcctcctgctcctttaatatggtttcataatacggtttcaggaaatcatatttcccatccaggatggtgtgctttccatccagcatcgcaaacatctggaccgtacttctccatgtatggtagtgggaaccatagacctcctgtcccggttccgtgttggcaatccttccggccagctcatcgtactgctcaaaggtcatgtcatttgtgggatattccactccggccttgtcaaatatatccttattataataaatcacccagaaatcgctcttgaagggcagctcatacaatttaccgtccaccgcaatctggtcggttaagcctttatatccgcttaagtccactccggccttctcgatataggaatcaagcggttccagaattcccttgttcaccaatgtggtatatccgggggtatccttgatggacaccacgtcaaagccggatccgctgcccgtaagctgcgtggtcaggaccgtgttgtaatcagaacttcccaggtccaccatttccaccttaatgtccgggttgccgctttcaaatgcctcaatcagcggtttatagtaagcggtcaggtccttgtcccacatagcccatttgatggtggactgtcccgaggcatcctgcgcctgtgtacctgtctgtgtaccttccgtggttcctgactcagcgcctgaggctgtacctggggctgttgtatctgctcccgctccccctccgcagcctgccagggaacctgccatgactgctgccatcataagactgattaaacgtttcttcatcttcttcctcctgtctttatacagcttgtttgttatgtctatattatagctgccgggctctggatcctgaatggaatatctgtgaaaaaagatttattttttattcacaaataaggacattttacaggaacacccggataatacctgtatttttttacgataaacaagtaacattttacaatacattcaaataggccgccacattttttgattctatttgacaaatgattttccattgtctatagtattggtgaaaggcaggtattcctatgataaaacgaatcatgccatccagcatacgcggcaaaatcatgctctgcaccggggccatcacccttttgattgcagcggtcacggtatccatctgctttgtggtctttcagtctttccttcgccgcaatcagattcagtcggctgagtataaccttcaggtggtatcccacaatgtatccaatgacatggataatattatctacttcaataaatggtgcacttccagcacggatatcatccagtatctggagggcttccagaaccaggttaaaatgccgtccatctcatccgcaaaggcgcccctgcgctccatggccttaaatgcctataaccggctgaaagaagaattctttaaaacttcttcctcccagtatatcatccgggccattgtaagccctgaaaactgcatgaattacctccaggtcaatgacagggcggctgcctccattcccagagccgcgtccacagtacaggacctgccttattttcatgagctggtcactgccggccagtatgtctggatggggttggaggactgtctctatccagcctccgactcctccctgtgtatccccatggcacgtcctgtaaaaaaccagtacaatacggaaaccgttggctggacctacctggctgtttccgaccgcatttttctggactacctgaaggcatttcccctggaaccggacagtctcctttacataaccattgggacacattcctaccagtacaaggacggtctgtttacagaggcctcccctgactataccgctgtcagggaaataaataaggatgttctgaacaacagcaccacggtgcgtttaatacgcatggcagacaacaccacccggaggatgatatcccgtcccctgtgggaccagggctggagcatttccctggtactctcggagcaggactacaatgcccagaaccagatgtatctgctgcttatcggcaccattgtcatcatcatcggcctgatgggactgatgctggcctatatactgaaccgcaccatcagccagcccgtgaaccagattcgggacaaaatccgccttatatcggaaggggacttttccagggatccgtccatagaatggaaggacgagctgggagttatcgggcggggcattaaccagatgtcggaaaacgtggtcagcctcatggacagaaaggtggaggatgagaagcagaaaaaggacctggaatacagaatcctccaaagccagattaatccccattttctctacaacaccctgaactccatcaaatggatggccaccatacagaatgcccccggcatcgcggaaatgaccactgccctggcccggctcatgaagaacgtatcaaagggaacggatgtgagaatttctctcagagaagagctggatttggtcagagattattttctcatccagcaatacaggtacggaggcagcatttccattgcatacgagataacagatgaagctctgtaccattgccagattcaccgcttcaccctgcagccccttgtggaaaatgccctgttccacggtatcgagccaaagggatgcgcgggaaaaatcgttatacgggctgaaaaggctgccgtaaccggctcccgccccgccctcgtcatatccattacggatggcggcgtgggcatgagtccggagaccatccgcagcgtattaagcggcgaagcatcacccagcgctgatttctttaaacaggtgggcattaataatgtagataaacggatcaaatacagcttcggaccggaatacggaatccgtatagaaagtgtagtggatgaatacaccaccatggtaatcaccctgccttatatgatatcggagaggatatgacatgattaaaatactgatagcagacgacgaaccactggtgcagattggcatcaaatccatgataaactgggaggaattcggcattgaggtgtgcggcactgccatgaatgggcaggctgcccttaagatgattgaggaatatgctccggaattagtcatcacggacatcaaaatgcccattatgaacggcctggagctggcaaaaaaatgccggaatacctatggacccatccccctttttattttccttaccagctatgaggaatttcctctcatcaagcaggctctttcctacagggccgtggactatctgattaaactggagctggatgcggagggccttaaggacacggtgagaaaggctctggagcgtctggaggaactgcgggccagccaggcctaccgccaggaaggggaaggcaggcccctgctgcagaattataacgacaaattttttatgcggctcctccataacctgtttgacagcagggagcagtttgagattcaggccagggatttaaagctggacttttccgcccgctgtttcctggccgcccatggggagatgcacagtcaaaaggcaggagagatgaacccggaccagcagatgaagctttattccagcagccttcaaatgatacgggaaatcctcacgaagtatgcctcctgccatgtcatatccctggacaaacagcattttgccgccatcttctgtttggacaggcaggaggagttaaattccggcgtgatggatgatgcctgggaaaacacctgccatatggtccacaattacttttctgtggagctcgccgtgggcctgggaactccggtagaggacccccttaaaatcaacgaatcctaccaggaagcccgccaggcatccgccatggcggacggcaaagcaccagtgatatcctttgccgggatagcggaggactccattaagaatgccttcaacatcgctattttcagggaagacctgaccaaggcctttgaggaatttgacacggatgtgctccatgccgccatttcccaaatcatagagcttttttcctcccatcccatgcgctacattcaggctctggatggcgcctgcaacatcctctacctggccctttcccttctcccggacggtgaggataccatggaccaggtatttgcgggatgcacagacggctaccggtccatctataaaatgcagcaggcagaacagatcaacggctggctggcccagtttagggacggcctgtgccaggtgttaaagagccggagaaagacctataaggaccatgtggtcaccaatgtccagaagtacatccagaaccatatcgaggaacgcctttcccttaacgaggtggctgccgtattcggcttaagtcccaactacctaagctctctttttaagaagacctgcaccattgggttctccgaatatatcacccagaaaaagattacacgcgccaagtccctgctgctggaccaggacgtgaagatatatgaagtggctgaccgtctgggctttgacagcgccttttatttcagcaaggtgtttaagaaggtggaaggaatctccccaagggagtttatgcagtcccatatgccggggagcatggaggatgacggggagaaatagaaaagaagcacacagggacctcccatcctgttggattatccggttctgccgcatctagcggcggcaccgccacggaggtatcctgtatgctttttttcatcgtccctgccgctgtgtcattagctttcataaggatgaatgcggatgattccggtgatagccttgtctgttattatagccctcctaactgcccgtacccggctcttactttccatttgtcttagcattaccggtgcatctcttccatggacatatcgtcctttatcctgtaaaactttatcttttccctcccattgtccttcctgaccgcataccgttttcctctgaacggcacactcattgtgaaatggctcagctttgccggaatatgtggaaacagcccaaacccccgcgcctggccggggtccggcacaaaacctgcaatctcctcaataagcacaggtatgggagcacttgcccacggatggcagaggctggtgttccacttctgctccttgccccatgcctcaaagcaggtatctgccccctctctcagcatattcacccatccatgttcggattcattcacaatagaccggaacacatcttcataccggccaagtctggccagggccttcagataaaaataacttaccagcacaccgcaggccagtcccttttttaccagaaaatcccctatcccgccggaggcttccccgggctctaatccataataagcagcataaacattggagtgcagggcacagtggctgcttgtctcactgtccgcaaaaagcccctttttcggacggtaaaatgcctttatataggaattccgcagtttttcccaatccatggagtgagccaaacccagtatttcttctatctctgtcagatttttcgccgccccggtatacagagcgtttatgacgttatgacatccataggccaccaccggacggctcagctcaaaatcatatccatcccgcagattttccggccagtccaccagattccacttatcccctgcccgaaccagcagtccgtcctccctggcatatgctctgaaatgcccaagcacgccggcggccgtccggtaatgggaccgcaggaaatccttatcccctgtaaaccggtagtcaatcagaagcagttccagccacagcaatgaaaagtccgcaatttcctgcataaaagaaccgggcgccaccgccataagaccggggcaaatgtatctggtaagagcaaactgtcctatacacttgcgaagcatctccacgcttcccgtaagccatacctgggaatgggccgtcaccacggcgtcgcccagatactgtcccttttccctggtagggcagtccaggtatccttcctgggtgcccagccttaccccatttttacagatggcaaatatgcggtctaaatttccgtcactgctctttacggtacagagacctgtgtccataggataatggcgcaccagcccctttatattctcgatcctcactccggtatccggtatgattctggcgtagcggaatcctttataatcataaggctccagggtgcttacgccgttgtccagggtccatatctcctcgtaacggcagttgcagcgcatatcatagcggacatccccgtcccggcactcctgcgcacatcgtatgatgaccctgtccccggccttccccgctgcccgtattaccagggccccggttatctcctgtcccatgtctacgaaccaggatgaacgggatggattctcttttgactgtggggacctttctttgttcggtgggagttcttcctttgccggcgaggtttcttcctctgccggtattggctcttcctttatctgcctcggcttaatctcatatatatccagcatcttcacaggctgttttgtaagccggtaatccgcccattctgcctgtaccatgtatggccagtccctgtcctcgtactcaggaagcttccatccatcatcccatttccggctgtcaaaattctccagaaattgtgtatcatatccgatgacatctcctgagtaggcatggcagatttggtatctccagcgcagaccgcagtccgggaaagccgctcccgcgggctcatccgccgcggtcagctccgccatcccatccccagcggtcagctccgccatctcatccccagcggtcagctccgccatcccatccgccgcaatcagttccgccgccacgccaaaacggccgtccccgctgttccaaacccggttgatcaggccctggtaatagagatggacggccactatgttctttccctgatgaaggaaaggcgtaatgtccagtgtattgtaataataatgttccgggtatgacggcgccggtccctgggcgatgaagattccgttgatatatagtttatagtaatcgtctgctgatatccgcagaataactctcttgattccgtcccattccatgccggacctggctaacacatgaagattgcgcacaggttcattcttctgactctttctgctgtcagctgattcattctctttgtggtatacgcagaccggaatctcttttgagaattcaggaatggtgtaccatattggccggaatatctgcatctgcttttacctccttcagggcaaattcatactgtgcagttaagcataacaccagccagtccaatgaaccatggcaaaatccaggtaaatcatgtaatttttccggatacattctgcattccgttcatattttcagaatctgatacagacataattcatatctgccgtcactgactgctctcctctttcctctggtatgcctgctgcaaaataagaaattcctccatctcccccacagacaaaggcctggaataatagtatccctgtatctgttccacccctgtatcctatttggatagaccggtcctattggggagtggttcatacgcatcagagactccgcatacaggaactgcctggtttccacagaatatctgcccgtcttggcctgtgacacggcgtatccaatgtaactgaccgcttcctccaatattttcacatactccgaacgccgtataattcccatccttcctttgacttatttcttataccagtgacttatttcttataccggtattataaaatgtgcacagcgcacccgcaagaacgcacttaaaagtgggataggtacctgacagtgctatagtatcttaaagatattgtttggtttacaattattttaaggtattctaatattttttgttgaaaaatcccagtaactctgctacaatcccattaagaagatcttatcttaaccaataattaggagggtattatggaacaaatgttattcttagtcccggtagtggggctgctgggactcctgtttgctgtcattctaaggcagcagatcgtcaaggaggatccaggcactgacaggatgcgtgagattgccgacgcaatcgcagagggcgccaacgcgtttctggcttctgagtaccgcatactggtcgtctttgtagccgtgttattctttgtcatcggttttggaacacggaactggattacagccggatgtttccttgtgggaagcggtttttccaccatggccggttatctgggcatgaatgccgctatccgcgccaacagccgtaccgctgacgctgcccgtacatccggtatgcaccgtgcactggcacttgcattctccggcggaagcgttatgggaatggccgtggtaggcttgggcctgctgggcgtaggcgtcctctacatacttacaagggacgtatccgttttatcaggcttcagcctgggcgcttcttccatcgcactctttgcccgtgtgggcggaggcatttacaccaaggcagctgatgtcggcgccgacctggtaggcaaagtagaggccggcatccccgaggatgatccccgtaatcctgccgtaattgccgacaacgtaggcgacaatgtaggcgatgtggccggtatgggcgctgacctgtttgaatcctatgtaggttccctgatttcagccctgacactgggccttgtattttatcaggaagccggcatcgttttcccgcttatgctctcagcctgcggcattattgccgccatcataggctccctgttagtcaagagcatcggcaattccgatccgcacaaggctttaaagacaggcgagtacagcgcaaccgccctggtagtggtctgctcccttgtcctcagccgtatattcttcggtaatttcatggctgcgtttaccatcattacaggcttgttggtaggcgttctgatcggagctgtcactgaaatatatacatccggcgattatcgttttgtcaagaaaatagccgggcagtccgaaacaggctccgctaccaccatcatcagcggaattgccgtgggaatgcagtcaaccgcggtccccatcctgctggtatgtgtgggtgttctgatttccaacaagcttatgggcctttacggaattgccctggcagccgtaggcatgctgtccaccactggaatcaccgttgccattgacgcttacggtcctatcgctgacaacgcaggcggaatcgctgagatggccggtctggataaaaacgtcagggatataactgacaagctggactctgtgggcaatacaaccgctgccatcggcaagggttttgccatcggctccgctgctcttacggctctggccctgtttgtatcctacgctgaggcagtaaaactcaccacaattgacatccttaacgcgcatgtcattgttggacttttcattggaggaatgctgactttcctcttctccgccatgaccatggaatccgtatccaaggccgcccatcagatgattgaggaggtacgccgccagttcagggaaaaacccggcattctcaaaggaacggaccgccccgactacgcttcctgcgtatccatctccaccaaagccgcccttcgggagatgttcctgccaggtctgatggcagtgctggctcctctggcaaccggtctcatcctgggaccttctgctctgggcgggcttctgaccggcgctctggtaaccggcgtattaatggccatcttcatgtccaactccggcggcgcatgggataatgcaaagaagtacatcgaggaaggacatcacggaggcaaaggcagtgattcacacaaggctgctgtggttggcgataccgtaggcgatcctttcaaggatacctcaggtccttccatcaacattcttattaagctgatgacgattgtgtctctggtatttgctcctttgttcctgcggtttggtggattaatttaatctcaaagccgaattctttttacggctacacaacagttaatgggaaggaaaatccaaaactcggattttccttcccattgttttattaaaatgctgttggcaaagggctgtatccaggcggcagcctccttccctccaactccattactcatcaaaaatactcactatttccccatccaatatccggttcatgttcttcacggcgcagaaattaccgcacatggaacaggtgtcctccttttcgggtttggccgattcccggtatttcctggctttttccgggtcaatagacagctcaaacatgcgctcccaatccagttttttccgggccgtactcatctcgcggtcccactgtgccgcaccttttatgccttttgcaatatcagctgcatgggcggcaatcttggacgccatgatgccttccttaacatcgtccaggtccggcagtctcagatgttcggccggcgtaacatagcacaaaaaagacgctccgctggcggcggcaagggctccgcctatggctgcggtaatatggtcataacccggagcaatatctgtcaccagaggaccaaggacataaaaaggggctccctggcagatagtctgctgtatcttcatattggactgaatctggtccaaaggcatatgtcccggtccttctatgatgacctgcacattcttttcccacgcccttctggtcagctcccccagcgtcaccagctcctcaatctgggatatatccgatgcatcctcaatacatcccggacggcaggcgtctcccaggctcagtgtcacatcataggcctgacagatatccagtatcttctcaaaatgctcataaaacggattttcctttcccgtcatttccatccatgcaaatataatagaacctcccctggacacaatattggtaaggcgcttcgccttcttgaagcgctccgctgtctgccggttgattcccacatggatggtcatgaagtccaccccatcctccgcatgcatccttacgatatccagccactcctgtgaagtaatatccttcagcggtttgtggtaataaaccaccgcatcatagatgggaacagtgcctatgattgcaggacactgggcagtcagctttcttctgaatgtgcgggtatccccccatgaactcaggtccatgatggactctgcccccatcctcaccgcatcatttaccttctgtaattccatttccaagtccttgcagtcccttgaagtgccgaggtttacgttgattttcgtcttaagcctggatccgattccatttggttccagacaggtatgcagccggttggcaggaatgacagccttcccctcagccaccagccgcatcagttcagctggttcaaacagttccttatccgctacccttttcagctcctctgtcaggatacctttcctggccgcgtccatctgcgtggtataatccatattttcctcctcttcgcccggagcccgcatgtggttaaaagtaattttcacatgcaatctattaaaccgtgttcgtttgcccgcgtcatgccggatatacttcaggacacaaaaaaggcccataccggtaaggaatggaccattcatatcatgcaagcttgtacatactccatatttccctacgttggcattatccaaatcaggtttaataggtcgaagttcgattacttcctctcagcctgccccacaagctccctgttgtaatatgactgaatacggcagttctcccgctgtatccgaaaggcattttcgcctcactctgtcagtttatatggaaaatatctgcttgtcaaccattattctcaattgtttatccaatattatcctgcctcctccctcctatcgcacctactgccttcctaccacatccccctgtttgagaataacagtcaaagaattctatccattataacgtgtacgctgagtcattacaagaaaaaatacgcccgcatctgatatcctcccaggagcaccgcattcctctcctcctttttcccattataccattgattccgtctgtctgctatctgtgccgttaatatcacgttaaaaatccgtcaaattattgctaatacaattactgctttatgacaataatttactctcgaatattaaaatttcccagtgattatacacaattttgtcgatataataaaaaccagttacatgttctgcagacattgacatacgcaaataaagagagggattggaaatggtgagtgttttaatgaaaaggcttgcaattgcagctgtggccggcgctgtcatggtttcggcttccggatgcagcttggtttcctcaggtaaaagaattatccgcgtgtcgcacgcacagtcggagacccatcctgagcatctgggaatgctggcatttaaggaatatgtggaagaacgtctgggagacaaatacgaggtacagatattccccaatgaaatactgggatctgcccagaaggcaatcgagctgacccagacaggagcaattgattttgttattgcgggtacggcaaatctggagacatttgcggatgtctatgagattttcagcatgccctatctttttgactccgaagaagtctaccggtctgtgatggaagacacggattatatggaaaatatatacaagtccacggacgaggccggtttcagggtggtgacctggtacaatgcgggaacccgtaatttctacgccaagactcccatcaacacgccggatgatttaaagggcaggaaaatacgtgtacagcaaagcccggccagcgtggacatggtcaatgcttttggcgcggccgctgctcctatggggttcggtgaggtgtatactgccattcagcagggcgttatagacggcgccgagaacaatgagctggccctgaccaacgtccatcaagctgagggagctgcctaaaattttcctggacagcgcagagatgacaggcattatcatcttccttatcggagtatccagcatcatgagctgggtcatggccttcaccggcatccccaccgctgtatcggaagccatgctgggaatcagcaccaaccgctatgtaatactttttatcatcaatattctgctgctgattgtgggaacctttatggacatgacgcctgcctgccttatcttcacccctattttccttcccatctgccgggcgctgggcatgaataccatccactttggaatcatgatgatattcaacctgtgtatcggcaccatcactccccctgtgggaactacacatttcgtgggagtaaaggtgggaaagacaaagatagaacaggttatccgtcctctgctctactactttggcgccatctttatcgtgctgatgctggtatcctatataccgcagctgtcactgtggcttccgggtctaatgggttatgtataaaataggttatgtataaaatatgtgtatcagggaagggccgcgctgtgcgacatcatatcacagcgcggcccttcttttaccttgatgaaattcaggcttaagccttctttaacctcttatcctccagatgggaaacaatcactgcgcaggcagcgtcccctgtaatattcaccgtggttcgacccatgtcaaacaggcggtcaataccggccacaagtgcaattccttccacaggaagccctacgctctgaagcaccatagccagcataatcataccggatcccggcacaccggccgtgcccacggaagccagaacagctgtcagtataatgacaatctgctgggacagggtcaggttgattccataacaggaagcgataaacacagcgcacacaccctggtaaatggcggttccatccatattgatggtggctcccagcggaagcacaaagctggccacctcctttctggcccccaacttttccgtgcattccaggttaagaggaagggcgcctacagaggacgcgctggaaaacgccattatcatggccggcgccatgcccttgaaaaacttaaggggtccgatgcccgcaagagactttacggtcagcgaatacaccaatgaggcgtggagtatgtacccgatataagccaccagaagcacaaaggccaggctgcccagtatctggggtccgttggcagccaccacaggcgtaatcagacagaacacaccgatggggctcagcttgatgatgaaggacataactgcgatagacacatcattggcgctctccacaaagtttccaaatacctctcccttctttcccgccacaatggtgccaaagccaaagagcaaagccaccacgattacctgaagcatggatgcctcggccatgggctgtatgatattgcttgggaaaatgccaatcagggtctggataaaactgggcgtttccgccgccgtgtactccagggagctggtggacagcaccggaaatccctttttgaacagattcgctatcaaaagtcccatggtaaccgcaaaaaaggtagtgcacatatagtagatgactgtcttacctccaatgcttcccaccttcttaatatccttcatggaaataacaccgttcatgatggagaacaagacaatggggactacgatgaatttcagcaggttcagaaacagggtgccaaagggcttgatgtaaatttccgcaatgtccggccggcccatcaacagcatacccgccgcaatacccaaagccaatccagtaaaaatccatagtgcaagcggtttctttttcatacgcacaattccccttttttagtatttttgcataaatgcaattataattataacacaatcttaacactattgctaccaaatacaaataaaggtaaatttttaacaatcttcctcctctgccctcataacggacaggctgccgcttatatccgcctacaggccggacataaaggtcattccacgctccatagccgccccggtgtaggccatatgttctttcatgatatcatccgtcatcctgctccgtgaactgctggagcaagtacaggaatacgtggacggcgcgctgatatatataccgaagactgccgggcacaaaaaacgctggggggaagggacctccacccggcaggagcttcgtttccgcaatcaacagatatacagtgattatctgtccgggctttttatattccatctgtatgtctcaaccttatttatcaaacaagaattaggttggtatccgcctgtcaggatgttacaatctgattcacctgcttcagccgaaccggtttcctccatcgtcctgtggattgataatccatacccgcttcccgtaagggcacatgccatattaaaaagtaaactgcacctgtcccagcgcagtctggacctgctgactgacagcggcaggattcaatgtgcagatggccgggaattgaaaaaaagcaggacaggaaaccatataaagctttacatcatcggtgttttagttccctgagtatggcctctgcatccagaccggagtacatacgtccgtccaccatgacattgggcgccttccggcagttcttcaggcagttcctggtcctgagacacacggtcccgtcctctgatatgccgtttttacccactcccagcctttttctcagttcatccatgacggtgaggctgccctttgccgcgcagttccttcctgtgcagagtataatttcatggctatagggtgttgtctttaaactgggataccgcttacatatggcctgtaccatggaatcccgtaccccggccgcctctgctgcctgctccagcacataagggctgatgcagccatgaacgccctgcagttccctcagcatctccacaatggcctcctgcgaagaacgctccggcagcccgcggtagtagtccagaatttccctcgtctgctcatccaggacttcattttcatttatctgcatatgcaaaacctcgcttccagtatagctttgggcttacagggcgttttttattcacaaaatccggtttttaccgcatccatttttcgctgcctcttttatatcaatcccccagatagtatatggcggtaaagtgtcccctggaattgtagaagagccggttccccgtcaactggctgcagataacctggcctgtttccgggtccaccggaccgggtaaaatctcccgctgatactgcgatgccctcaaaagcctggtatccgcgccagagacagctcccttcatgatatagatatctcctctgtagaccgtcttcatcaccgtatcccagctggtctgccacaggtggtattcatccgtattgtaatccggcctgattcctgtctcgtatccctggcctgccggttcttcccccgcatcatgaagcaggaagccgtaaggcgtatcttcctggccgggattcagcgacagcatccggctctcgcctgtaagctcgtccagagtcacttttgcctggccgccctccataaccgtctgaagctgctctctggtaatggaagccggaaccgatatctctcccggcacagcgtagtatgcccccatatccctggcctgagtcaggtcacctctcagtccggtttcatcatacctgcccagatatggcagataggacgccggtggaaggtcctccaggccatactggttccgcccgtccagcttgtctctgtccgtatcattttccattttctgtattaaggaaatgtttccggattccacatccgacagaatggaatctgaaaaggaatccggtgctatgatacccctgtaccaccttttttccgaaaaatactggctcagcacatcggatttaaactgccgtccgttggccgcataaatttcattccgaagaagccacaaattctccgtgggccacagacagagatctgccctggacagatagcgcgaaaacacatccggaaaggtcagactgtcctcaaacagataatagtcgccggccagtcctccctcacccttcactgaaatatgaggatcagcttcatcatccatggcaaatttaatggtatatgtaagcgccgggacccgcggaacctcttccatggtttccggtgttatcttgtatgtctttttgcccctctcagtcaggatttccgcgcttctcatgctgtcataatagctggtatgcatctcatccggaagggtaaagacacatttcagccgctctgactcccagccttctccggtgagttcaaaggacaggccgcaccgtatatcccccgccttaaagaacctgcctgttataagctggttgcgggctcccaggttttgtactgccctgacagcggttcccggctcttccagtccggcgcctccggctgctttggcattcccgggtgtcccggcccttcccgatgccccggcccttccgggtgccccggcattcccggctgcggactcccgtggcagcccctgttccgcttccgggtcctcatgttttccggactggctgacagcctgctgctgttgcacggtgccttcatcctccggatatgcctgcctcgtatccttcagccggcaggatgtcaaaaccagcaggaccatggcggtccatccagccctgtatatctgtttcctaatcactgtaaccccatcccttccattaattcggaccggatatatccatcatttcatcccacctgttctgcctcttgaaatccaagcagccggacaggcgggtcctctttatatcctccgcaaaggcgtcagccgtcatggcgataatggactgtttccagctcaaattcaatcagatcgtcaaagcggtcctccggctccggtgctttcaccggaaaccgctggtatttcaccatgtgataagtattctgtgtcaggttaaccgcaatcagcatctggtatgcggccttagctgccgtggccagccggctgatctacacattccgctcccgctccggcagaagttcatcctggacatcccgatataccagaacgaaccagcacttggtgcatcattcttggtctttctgcgctgggaggccgaaaaggcgaccttacctccctccttggtaaacttgatggtattgctcaggatattgatgagcacctgctggagcttcacggctttccctatggactgggacgctatggtactcatgacgatgtccagtaaaataagaaaaaccatctctccatattccctaaggagacagtgcttccagacaattgccggcttccagcaccttatatttgaatgacagaattttccttaatatcattcggttttttcattgtcttccacgaccaacattttcttctgtaaaatcatcgcttcatactcttgcccagcgtttatccgccggtgaaaccgcttatcccgcggcaaaaccaggcttcctcttcatttccttcttacatatatatcgtggtttcaccaaaatagacgttcttttgacaaatttccaatggtttaaatataacaaaaacaggtagaaaatgcaataggacgccaaagaaaccacattatataagtattcacctttttattatcccggcaccgttttgtgcaaattgcacaacattgtgtcagtaattttctcaattattgccgtagactaaaacttttttaggtactataattctttttaagataacaatttaacatttcttttgccaatatgtatatcctggggattggcccagagtctctaccaactaccgcaaagagttggctacatatcttaatgtagccagctctttttttctatttgtgtaaagattcgtactgaaattggcaggaaaagtaaggaggaaatcaaaaaatgaatattgtagggcagcaagtaaaacgtgtagatgcttacgggaaggtgaccggggaggccaagtacaccgcggacctggaaccaagagacatcctgcacggtaaggtcgtgcactctaccatcgccaacggcctggtcaaaagctttgacttgacagaggcctatcaggtacctggtgtggtgaagattgtcacatgcttcgatgttcccgactgccagtttcctacggcaggccatccatggagcgtggaaaaaaagcatcaggatatctgtgacaggaaaatactgaaccagagggtccgtctgtacggggatgacatagcggctgtcatcgcggaagatgaggtggccgcagccagggcagcccgcctgattaaagtggaatatgaagaatatactcccattgttacagtggaggcagccatggcagaggacgccactcccctgcatccggatctcaggaaggacaatgtaatcgtacactcccacatgaccatgggtgacagtgatttcacctatgaggacggacttaagaaagccgggtcctgttacggaccggaggaaatcatttccctggaaaaggaatacgataccccaaggatttcccactgccacatagagctgccggtttcatgggcctatgtggacaccaacggcaagataaccgtggtatcctccacccagattccccacatcgtcaggcgctgtacggcacaggccctgggggttccaatcggaagggtgcgcatcataaagccttacatcggaggcggcttcggcaacaagcaggacgtgctctatgaacccttaaacgcattcctgaccatgtccgtggggggacggcctgtcaggctggaaatcagccgggaggaaaccatctccggcacccgcacccgccacgccatcaagggaaaatgtaaaggcctggtgacaaaggacggacgtattcttgccaggaagctggatgcctatgccaacaacggcgcctacgcctcccacggccatgccatctgcgccaactgcggcaatgtgttcaaggatctttacagagatgagcttggcaccgaggtggactgcttcaccgtatacacctcctctcccacagccggcgccatgagggcctacggcattccccaggcagcatggtttgcggaatgtctcaccgatgacctggcagacgccattggcatggacccctgtgaattcaggctgaagaactgcatggaggacggtttcgtggatccggccaacggcatcaccttccattcctacggtctgaagaaatgcatcgaggaaggacgcaggcacatccgctgggacgagaagtggagctcctaccggaatcagaccggcccggtccgaaagggtgtgggcatggctatcttttgttataagacaggcgtgcaccccatctccctggaaacagcttccgcccgcatgatactcaaccaggacggctccatgcagctgtgcatgggcgctacggaaatcggccagggagccgacaccgtattcacccagatggcttcccagacaaccggcatcgcctttgacaaggtctacatcgtatccacccaggacacggacgtgactccctttgacaccggggcctatgcatcccgccagacctatgtgtccggcatggcctgcaagaaatgcggcgaggaattccgccttaagatactggagtatgccgcctacatgctgagccatgatgtaagcgatctctccaaaaccgtgtacgcggacgaggtaaaggctgcctctgccctgctccgggagactcttggacttaaggaaggggaactggtgtcggcggatatgctggacatagaaaacagcaaaatcgtggtaagcggaggggagccggtgctcttcgacctgtccgtggtagctgacactgccttttattccctggaccgctccgtacatatcacagccgaggtcactaaccagtgcaaagacaacacattttcctccggctgctgctttgtggaaatcgaggtggacattccccttggactggtgacggtgaaggatatcatcaatgtccatgactcaggagtactcatcaatcctatgaccgcgcgggcccaggtccacggcggcatgagcatgggactgggatacgggctttcggaggagctgctggtggatgaaaagacaggcaggcccttaaacaataacctgctggattacaagattcccactgccatggatacgccggacttaaacgtggcgttcattgagctggaggacccaaccggcccttacggaaacaaatccctgggcgagcctcctgccatcccggtggccccagccatccgcaacgccatcttaaacgccaccggagtccacatggatgtgactcccatgaccgcccagcggctcatagaaaaattcaaagaaaaaggtctgatataaggagaaggttatgtttgatatcaaatcattttatgaggccaaggatgtggctgatgccataaatgccctggtgaaaaatcctgacgccgaaatcataagcggcggcacagacgttctgattcgtgtcagggaaggaaaggatgccggaaggtccgttgtatccatccataatatagaagcattaaagggagtccgcctccttgataacggcggcctgtggataggagcaggaactgcattttcccatatcaccaacgacgccctgatccagaaatacatacccatgctgggggacgccgtggacatggtgggcggaccacagatacgcaacaccggaaccatcggcggcaatatctgcaacggcgccacctcggccgactccgcttccaccatgtggacactggaggcagatgttctgttggagggcccggagggcaaacgcaccgtgccggtctgcgaattctatacaggccccggccggaccgtccgccagcggaccgaggtctgtaccggtttcctggtacacaaaagcagcatcgagggctggagcggtcattacatcaagtacggcaagagaaaggccatggagatagccaccctgggctgtgcggtgcgcgtaaagctgagccgggataaagaacggattgaggatgtcaggctgggatacggcgtggccggtcccactcctctgcgctgccgtgaggcggagaatggtttaaaagggcgcgcggtcaatgacagggaagcaatcctggccttcggcaaggctgccctgaaagaagtgaacccccgttcctcatggagggcgtcaaaggaattccgtctgcagctcatcgaagaactgtccaaacgggccctggcagaagcaataaaaaaagcaggaggtgctgtcaatgcttaagattgtacacatgaaagtaaatggcagggaagtggagctggctgtggatgagagggaatccctgttggataccctgcgccagcgtctggggcttacatccgtgaaaaagggctgcgaggtcggggaatgcggcgcctgcaccgtactggtaaacggagaagccatagacagctgtatctacatgaccctgtgggccgaggggaaaagcatcatgacagtggaaggtttaaaggggcccaacggggaattgtcaccgattcagaaggcatttatcgaggaggcagccgtacagtgcggcttctgtactcccggtcttatcatgagcgcggtggaaatcgtgggaaccggaaaaaaatacaaccgtgaagagcttaagaagctgatatccgggcatctgtgcagatgcaccggctatgagaacatcctcaacgccatggagcgcatcgtggaggaggtataccaggtcagccgcaaaaccagcggggctgattaactatcattataacagggggaaccaattatgaacagaaatacgaattgcagcatcaacaacatatacagactggagggcagggtgcccatcgccaaggccatccccttcggcctccagcacatcctggccatgttcgtctccaaccttgcgcctattaccatcatagcgggcgctgcccagccggccctaagccaggcccagacagccatcctgctccagaacgcaatgtttgtggcaggaatcgccaccatgattcagctgtatcccatctggcggataggatccaagcttcccgttgtcatgggcgtcagctttaccttcgtcacagtcctcagtaccattgccgccaacttcggttatccagccgtggtgggagccgtgctcataggcggtatctttgaaggaaccctgggacttctggccaaatactggcgcagaatcattaccccagtggtggctgcctctgtggttacagccatcggattttccctttttacggtgggcgccaggtcctttggcggcggatacgcagacgacttcggttccgcccagaacctgattctgggtaccatcaccctgctgacctgtcttttgtggaacatctttgccaaaggatacttaaaacagctgtccgtactggccggcctgatagtggggtatgtcatcgccattttcctcggaaaagtggatataagcctgattatgtccggcggaatcatctccttcccccatctgctgccctttatgcctgagttccacgcaggggccatcatctctgcctgcatcatcttcctggtatccgcggcagagaccataggcgacacctctgccctggtttcaggcggtttaaaccgcgaaatcacgggaaaggaaatatccggatccctggcctgcgacggctacgcgtccgccctctccaccgtattcggatgtccgcccgtaacctcattctcccagaacgtgggcctggtggccatgacaaaggtggtcaaccgtttcactatcatgacaggggctgcctgtatgattctggccggactccttccgcctgtgggaaacttttttgcttccctgccccaggcagtgcttggcggatgcaccattatgatgttcggcaccatccttacctccggcgtacagatgattgccaaatgcggattttcccagagaaacatagtcattgtctccctctccctggcagtgggaatcggctttacaacagccagtgaaattgggatctggaacatcttccctgaattggtccagtccgtattttcagccaatgtggtggcagttgtatttgtcgtctccgtatttttaagcctggtgcttccaaaagatatggatatcaaagccctggaagggtaaagattggctgcggaagctgctgcgaaatagatgagtcatcatttatggagcagcagctccttttttatttctgttttttctttcagccatagttttttggttatcgttattcttttatgagtataacgatattatacaacactttctattatatgtcaccttcttttttatattttgtagctttgtactgtctctgtcctgcctagcggaatattcttggcatttttttatattattctcactttttcatcattttcttaattattttgcataaatcactgttttttcattccaatatatggtacaatatgtataaatatccaacaccaatcagggggaaatattatggctaaagaaatgattgcaatgcttcttgccggcggccagggctcccgtctctacgcactgacccaaaaactggcaaaacccgcggttccttttggcggtaaataccgcatcatcgattttccgctttcaaactgcgtgaattccggaatcgatacagtgggcatcctgacccagtaccagcctctagtcctgaacgagtatatcggcaacggacagccctgggatctggaccgcctctacggcggtgtccatgtactcccgccctaccagaaggcatccggttcagactggtacaaaggcacggccaatgccatctatcagaatatctcctttattgaacggtacgacccgcagtatgtaatcatcctttcaggagaccagatttgcaaacaggactacagcgactttcttaaattccacaaggaaaagggagccgaattcagcgtggctgtcatggaagtaccgtgggaggacgcgtcccgcttcggactcatggtggctgacggagatgaccgcatcaccgaattccaggaaaagccaaagaatccaaagtccaacctggcttccatgggcatctacatattcaactgggacatcctcagacagtatctcatagaggatgaggctgacccggactctgaaaatgactttggcaacaacatcattcccaacctgctgcgtgacggacgaaggatgtatgcttatcacttcaacggatactggaaggacgtagggaccatttcctccctctgggaggccaacatggaggtcctggacccggagcacagcggcatcaatctctttgatgaaaactggaagatttacagccgaaacagcggcatgaccggacacaggataagcggcgatgccctggtggagaattccatgattaccgacggatgccgtatcaacggacaggtcaggcactccatccttttctcaggcgtaaaggtggaggccggggcacaggtggaggacgccgtggttatgggcggcaccaccatcaaggcaggcgccatggtaaaacattgtattgtggccgaaaacgtggtaattggagaaaacgcagtggttggagccatgccctctgacggcgaaaaaggtgtggccaccatcgggcccggcattgaaatcggacccgatgccaagattggtcccagtgccatggtaaagaataatgtaaaaggcggtgaagaacaatggtaaattccaatgcaaatgcccttggcatcctttttcccaacagctatgattccctggttcccgacctggtcagcgagcgcctgatggcctccattccttttgccagccgttaccgtctggtggatttcatcctttccagcatggcgaactgcggaattgataatatttccctgattgtccgcaggaattatcactccctgatggaccatctgggctcaggccgtgaatgggacctgacccgtaagaacggcggccttaacctggtcccgccctttgccgaaaaaacagtgagcatctacaatggacgcgtggaagcgctggccagcatcctggatttcctgaaggagcagaaagaaaagtatgtggtcatggccgatacaaacctggctgtcaactttgatttcaacgcattgattcaggcccatatggacagtcaggccgatgttaccgtggcctacagggaggaaccccttcccggcgatctcaccggacaccgggacatcggaaaaagtctctactataccctggccattgacaatggccgtgttaccaagatgtacatgaactccaaagaaccaggagtgcagaatttctccatgaacatctacatcattgaccgggagctcctgattgaccagataaacactgcctatgtgcgcggacaggtattctttgagcgcgatatcctggcgccccagataggaaggctgaacgtgcaggcattccgctacgacggatatgtggcgcgaatcagcagcatgaagagctattttgacgagaatatgaagatgctggacgatgccaatgttaacgcgctcttctccgccggcaatcccatctataccaagattcgcgacgacaatcccgcccggtatatcaacggttcaaaggccgccaacatcatggctgccgatggatgcatcattgagggcgaggtggaaaacagcatcctgttccgcggtgtgaagataggaatgggcgccagggtaaagaactgtgtgctcatgcaggatacggtgatagaagctggggccagcgtagaatatgccgtgactgataagaatgtgaccatcacaaaaggcaaggatataaaaggtactgatacgttcccggtgtacgtggcaaagtatcagattgtataggaagcagctgaatccgctcaaaagaggggctgcgaaaaacagctcctcttttctccaattgtctgaagtgacagggcggaagaactcaatatctacctcgaatattttttcgctgtttacgacatccgtctcatcatccgtggccacacagagtgctatatcatcataataaggctaagtcccggcagcatcaaccacttttttgccccgaaggcaccggctcccggcacacggaaggtcacattacgatttcatggtccggcgttacctctatcagccttccgtccgctccatccggtcaccgctctccacctggaacgtcgcgtaatagctggtggacgtggtggaatggtagccatgggttcctgtggcatctcctgcattgggatggctgtgatggctgacattggtccttttggagaccacggaagctgttaccgacagcctgggggactgattgttcttgttccactggctcaatccctttactgctgtaaccacaaatactccaatgataatcacaaataccagggtaaacatgatttcaaaaccgcctccccagaaaaaggaatccatgtacataaatacccgcctctcttttccgttgtatatcccaatattatcacagatgcagccttatttatggatattcataccggcttcccacagacagcagccgcccttttttcagccttggcacgttacagggcctggtccgcatgctactgtcaatggccgtatccagataggtccggggcatgtaataatcgcagcccagttaatctgttccattatacgcttcaggcgtaccttaatacaatctcttacaaagggcgtctcccaaaactcatccgccgcctcaaattcttccgatggaaatgtaccgatgcgctgacggctgccacagaatataagcgcggcatccttactgaaaacagctatcttcatcctgcatcggtacatatgatttcctccccgcaaaacatcagcttttcccaaatatatattatttaattgtagcataagcaaaatctttaatcaacaatatttaccaaatagagcggcaattaaaaggctggcgcaaggcagggaaaggcaatccaaatttcccggttcaaatcctcctatccaggcagccccaaattcccctatatgttttttcaatttcaaatcaaatctcattcagaatatcaattggactattttttctcagttatttatactcaaataggtataaaagcgaaaaataagggagtttctatgtttagtttagggattgattcaggctcaaccatgaccaagggagtcctgtttgacggaatgaatgtggtgggatgccacatgcttcccacttccatacgtccgggcgagattctaagggacatttacgaccggctttacacggaggacaccgggttcgtggtgagtaccggatatggccgggagcttttaaaggaggcagacgcaaaaatcacggaaatcacctgccacggcgcaggcgcctcttatctggcccccggctgtgatacagtcattgacatcgggggacaggactgtaaggtcatcactcttgacagccacggacaggtaaatgactttttaatgaacgacaagtgtgcggccggcaccggacggttcatggaaatgattatggcccgggtaggaagcgacatctcacatctggacgagttcgtccatggatgccggcccgtacccattaacagcatgtgcgccgtcttcgcggaaagcgagattgtagggctgatggcccaggagacacctccgggcgacatcgtacttggatgtgtccactccatctgccacaggaccgccatctttgcgcagcgtctgacaggcggacatcctgatattttcttctcaggaggcctggcacagtcagaagtcatgcggtccgtactgggagaatatatgaaaacttcccatataaccactcaccccctctctcagtataccggcgccataggggctgccgttctgggatatggaaaactaaagaaaaggagccgaagctgacatggaactgaaaaaagaactgcctgaaatttttgaagaatttgcggacgcaaggaagaattcatttcttgcaataaaagaattaaaggaggaaggcatacctgtagtcggtgtcttctgcacctatcttcccagggaaatccccaatgccatgggcgcctctgttgtgggactctgctctgttactgacgaaaccatacctgacgctgaaaaggatttgcccagaaacctctgtcccctcataaaatccagctacggctttgccaagacggataaatgccccttcttttatttctccgacctgattgtaggcgagacaacctgcgacggcaaaaagaaaatgtatgagatgctggctgagtttaagcccgttcatgtcattgagctgccaaactgccagacagaggccggaataggtctttaccgccaggaactgatacgttttaaggaggtgctggaaaagaaattcggcactgtcatcacagaagatgccatccgccgccagatacataacagaaaccagattctcgcggcccttaaccgtctccagtatgtgatggccctggatccggcccctgccctgggtctggatatcgtcaacattgtttacggcacaggatttaagatgaaaattgatacattggcggaggaagtcaatgccatcacggataagattgaggctgagtatgcccagggaaaaaatattggaaaaagggccagaatccttgtgaccggttctccatccggcggtgccgccctcaaggtggtgcgcgccattgaggataacggcggcgtggtggtctgttttgaaaactgctccggcatgaaacccctggaccccattgatgaggataacccggacgtatatgacgccctggccaggaagtacctgaacatcggctgttcctgcatgtcccctaaccccaggcgtatggaactgttagacaggcttattgacgatttccatgtggacggcgtggtggatttggttctgcaggcatgccacacctacaatgtggagacttccctggtccgcaagctggtaaaggagaaaaaaggacttccctataccgttgtggagacagactattcccaggccgacgtgggacagctgaacaccaggatggcggctttcattgagatgctgtaatagctgtaatgtaagaaaaattaaatttaaaaggacagcctcaggaaaagtgagactgtcctttttcacatatcatgtttcttccgtctcaatgcagtgcagcgggcatctgatgtgaggaatcctgattccatctcattaccacaatagggacatttcatttcttccactgcctccttgtctttctttccattgagcataacacagatagaagaaaaatacaacaaacatccgcatgggccgaaggatgtgccggagggagcagggaccgcaggaatgcctagtattgcagggtttcccaggggtgcagggtatcccaggtattaaccggctggtttcaggaaccggtgttgcagtgtgattttccctgggttataatatttagtatgcagaacaaagaatcaaaggaggatatacatatggtagaaattaacagaggcgcctgcaccggctgcgggcagtgtaccagggactgtatcgcaaaaaacctgtctctgagagaaggaaaagcagaggtttccgggacctgtattctctgcggccactgcgttgctgtctgtcctgtaaacgccgtatccatcccggaatatgatatggccgatgtggaggagctgagtcaggaacaggccaggctggattcagaccgtcttcttaaggcaatcaaattccgccgcagcgtacgcaattttaagcagaagcctgtccgcaccggtgacctgaatatgctggtgcaggccggacggtatactgctacagccaaaaacatgcaggactgccgcttcatctttgtccaggaggagctggaaaccttaaaagcccttatctgggacggaatcggccgtattctggacagtcctgtcccggggccggcccagccatacagaggcttctataaggctcatatggctgatgcaaaacaggattatcttttccgcaacgcgcctgccgtgctgtttatcgcgtctgagtccaatatagacgctggactggctgcccagaacatggaactgatgggagtgtcactggggcttggattcctctataatggctatctgcgcagggctgccgaaatgaaccacgaggtgatggaatggctgggcgtgggaaaaaaaaggatagaggcctgtgcccttctgggttatccggatatcacatataaaaggacggcgcccagaaggacggcggatgtgattctcctgtagcctcatggtcttcctctacagccgcttcataaactcaatatccttcctggcggctgccggattcatttcctcccggagcagatacatatccggtttattttcatggagccatcggctgatttccttataccccaggatgccttctcccagctgttccggctgatatgcacggtcctttcccagactgtagtctttaatatgcatcacgtcgatatacgctccgatgccctcaagccactggttccagtaagtatcctggtccacttacggtccggctggaagcatgaccagaatttccgccacctcattatccgtggcaacccgctggggcggtccccaggttcctgcgcctgaggtaacgatgacctggggcgaatcatccgatgcccggtaatatccgtaatccacatcaaatacagcgttggtaatcagattaaaaggaaacatttgtccctggtgggtatgtccgcagagaatcaaatccgtctcttccccatagtcccggatatttcccggctgatggtccattacaatgacaggcagctcccctgcctttgcaggcagcgtgagcttttcccgcttatccccctgcccgccaatgggaaaggaatccttcctgcccgccagcacaaaacggccgtctatgacaaccgcctcatcccgcagcacatgaacgcctgcttctgagagaaattccagcatgcggccatagcttgggcctgcatcatggtttccaaggcaggcgtaaacagcgtaaaccgtatccattttcagaaacaatgccttaagagcttcagggtcagccgggacagcggcatcgccgtcaaatatatctccggcaatacagacaatatccggctttgtggaatttaccgcgtcaatgaccttttcaagatggtgttctcctatgacataccccagatgcaggtcgctgattagggcaatccggagcggagccttttctgcatccttgccgcccatctgaacttcgtagggttttatctgtattaccgccccatggacagtaccatatacggacagggcagctgaaagaaacagcggtatggttcccgctgcaatgcctgcccggaaggacaggggtgacggaagaatacgcagcagtcctgccaggaacaccagaaatcctgccagattaacgaacatcaccatgtagacaatgaatccaaggagatagtggtcagcatagaaaacaggcgcagttatatggttgtttggaatacggctgacaacaaacgctcccaaaatcccggtaactgccagaccatagacaattccatacgccagggaacccatgcccggaaaaagcggtccaagccactggtacaatttccgccccgcattggcaaacaatccaattgtgaccgcaagcgcggtaaacagacttatcagtttcattctttactccatttcaggcctaatcccctgtcctttcatgatagttcacttcttcacacaaatccatgaacagccgcatcaatgggctgacccacttgttcctatggtatgcgcacaccgccgagaggaccggacgccccaaatctgtcctgactatctccagttctccctgttccagttcttccctcaccgtaaattcaggcagaaaggaaatccctacctcactttttaccagattttttatggcagggatgctccacagctcaatggtatggtccagacggatgggactttttaacctggggcgaggcaactaaaacaacaggatattctcccatggacctggtacagagtcctgtgccaaagcctcctaccgtttcataaaacacccccaaatccagcgttcccttcgactgaccaccatcctgaaaatgtggctgcggaacggatgccgggaaacaccggaagatatatgcgaaatcattaaaagtgaatacggcaggtccatggagtaaaaccgcatggatttaccttcttattgtccgctgccagaacttcctgccgtacgttctcttttcctgtaataaagaggtgtatatcccatatatccggaaaatgtgttggaaaaatggctgctgccagaaaacccggctgccaatgcaatttccaggatactcttgtccgtgtgggtcagcagatactctcccatgcgtacccagtaggaaataagataatccacaggggactgccccagtatttccttaaaatcccggcagcattcgctggcgctgacactggctgcctttgcaatatcctccagccggatttttccggcatactcctggtgaatgaattccaggcaggaacggacccgcctgtactggacatcggaaaaggccggctgctgcttatttcttaaatccagattttcatacagcgtaagccccatctgctgcagcagaatctgaaggcgccacagatatcccctgggccgcctgcagtcacactgatacatgtcatggatgcaggacaatgcctccccatgccatggacaggtattgtcaaacagaaagaaatccctctctgtttctgtaataagggaaacatactgcgtttccaccagtcccccggaaaggccgtggagcagataaggggcagccagcacagcgcagtaaacgctgccgtgctgctggtggtagggcgtgaccatgtgcagcatattaggcggcaggagcccgccctgcccggcagagagcacataggaacagccgcctgtctgaaactcaatgtcccccttcagcacataaaccagctccaattccttatgccaatgccagggtatgacccggtttggatacaaatccagatcatccagatatacttccattggaaaagcaggcgtgccatgacaggtgacttcctccaggtttccgtttacctccagatagtttaactgcatatcgaaatctcctttacaggcaagacaggattctgttattttaagccgtgattttattacaaatatctctacaattccattataataaaaaaaggacatatgcaaggtattttgttcaaaggagtgatgatggaaatgaaattgacttatattaccatccataccatggaaccggagataatgaaagatttttatataaaatatttaggagcggtcgtggatgatgcacgtccctttgacagggacggttcaggaaaggataaccgtgtggcgtccccctcgtcatacgggaccgtatacagcctgtcttttgacggaggagtaaaatcaagctcataccggaacagcccggctcattgggagtcccatccgctgtttcgcccgccgttccatccgtcataccatccttcccggaaacccggcctccttatgcggtgcggctcaccttcagagcaggcagcaggaaacgtgtcaacgaacgcaccggccaactgatactggaaggccacgaagtaatatgtgaaccccattaagcctgtttccatgtattcagatactcttccgccatgtcctggggaaccatgctaccgcctgttgcccaggctatatgggcggcctgtcccatgcagtcacagagtccctttttcctgatgtatccttccatctcatccggatggaagaatgctgcaaaggaagcgcatgcagacggttctatgaatatattctccgttttcataagcgcgcgcatcagctcatacagttttctgtcctcaattgtgcagatacctgcaaggcgcttttcaatcacctttcccacaaacgcggacggccttcccactgcaagcccgtcggcatccgtcctgccgctgattccaaaatccctgacactgaccctgtcgtgctcgcctgtggccattcccaccagcatgcagcatgcctgggtgggttccatgaaaaagcagtggacattatcgccgtaaacctctttcaggccataggccacgcctcccggcgccccgccaattccgcagggcagatatacaaacaacggatgacggctgtccacctggatttcctgttcctccagctggcttttcaggcgctctcccgcgactgcatagcccagaaacaggttgacggaattctcatcgtccacaaaatagctcattgggtcctggctggaactctttcttccctcttccacggccgcacagtagtcggattcatactccataaccgtgactcccttgcttctcagcaaatcctttttccactgtttggcatccgccgacatgtgcacaattacctgaaatcccagtttggcactcatgatgccgatgctgagtcccaggttgccggtagaccccacctgaaccttataccgtccaaaaaactctttcatttcacaggaagccagtttccggtaatcctccttttccgtgagaagccctgcctcgaaagccaggtcctccgcatgttttaacacctcgtagatacctcccctggcttttatggagccggatatgggaagatggctgtccatttttaaaaacagtctcccggagattcccgctctccactcctggttcagttcctgtctcatggcccggatttcccgaagctccgattctatcatgccattccggccggcagtctcagggaaaacctccgccagataaggcgcaaagcgggccagcctccctgccgcgtcttcaatctgctccccggatactgttttttctccctgtccgttctccgggcactccctgtcatttatccacagcatttcttttccggcagcagcctcagccaatgccggtatctgtctgatgtatgtttctattcttgaatccatgatatcatttccttcctgtttgtaaatgtaaatgaaatatatatttgcaccgttatgtatgattctccttaaaaaattccctggtcagcctcatgactaccggagacagcttaaaaagggccagcacattgggaatgattaaaagccccagcatacagtcctggatagaccacacgattcctgccgtgctcaggcttcctgccaaaatcaatacaggaaacagcatacggtaaaaccagtcccccttcaagctctttatgtacatcagactcacatgtccaaaataccactggctcatgatggaggtggaagcgaataaaatcaggctgacagaaaccacatatttcaaaaaaggaaatatggttccgaatgcctccgctgccagggatgccgcatttgccccttccaggggcacaccgcttgccaggatggaaaagccagtggtactgcatataaccatggtatccaccagcacctccgccacaccgtaaaagccctgtctggccggatggtctacctgggccgcggaatggatgacggccgcagaaccttcgcctgcctcgttggaatacagtcccctggccacgccgaaccgcatggcctccttcattgtcagccctgccgcggcccccatccccgccttcatggaacatgcttcccggaaaatgcggttcagcatgggcagaatggattccagattggcaaacaccaccacagcgcctcccacaatatacagcgacgccatgattggcacgactttctgggctgtatccgccagacgtttcaaccctccgccaatgataaaaatcatggcagccgccaatacaacaccggtacacagcttcgggaccccgaacacctgataggctgcgcctgatatggtattggactgaatcagggttccgcctgcattctggaaaaacagaaggacagccgcggccacgcccagacaccgtgtatggagtcccttttcaatataatacatgggaccgccgtaatagcttccgtccacgcctttttgacggaacaccagacccagtacgatttccgcatatttggtggccattcctaaaaatgcagccgcccacatccagaacagggcgcccggacctccaccaatcaatgcagtggcaacccccacgatattcccgcttcccacacagcttgcgattgccatataaagagcctggacggaggacacggttcccttatggttccgggatggttctgttctatcttcttttttgcagaattcctttataatccaggggatggacctgaactggatgcagcccgtggcaatggtataaaacacgcccagccccagcaatacaaacagcatccagtttccccacagcaggccggccagattccccagaactgcctctgctgttttcatcactccaaccggttccttccctctgcctgcggcatatgaaatcccatgacagctgccagagtaggcgctatgtcaatcagcttcatggagcctatatcgtgtttccgttctatcccgcatccttctatcatgaaagacgccctcatttcctcgaagttttcacagtagccatgctgggctttctggtgcagtttttccgtacagtaatccccctgcacatcgtcccgtatttcatatcccttttgagagaccagcacatagtcagccagagggaaaccgcctcgttctatggcctgtttccggtccagtacctccagaatgcccaaatacggattggatgacagctccttcattacctgctccagcttttttccggcatcttcatcctgcccgtccttcagccggatttcagacatgccccctgcacgctgggaccaggctttccagtccgttaccctgccattttcatctgtagtgataagccctgcttccctcagcttcacattaggccggatattataccgattgtccagtgtcccatggtcggaaacaacgcagacaaccgcctggtcatccgttattccatgtaccttctcaaccaagtctcccagcattctgtcaatggcctcaaccgcatgggcagcctctttgctgtataccccatactcatgggccatctcgtcaaaggacgcaaagtaggctgacatgaaaaaaggctgttcctttaccctgggcgccagcttatggtccaatacccacatggctgccttgtaccgctgcctgtccccggcttccgtcaggtccaggcctcctgcataccttccaatttcctcctccatctccagaaccatgccctgcggcacggacatggcgtcgataaaccggctgtccagctctgttccatcccaccagaattccggcgccataaaatctcccccggcagccactgatgtgggaaatgccacgctggcagacagatatccgtgttttccggcagcctcccacagattttccacttttctgctggtaaaccaatgccatgctcccatatgctcctccatggggtcaaatattccattgttatatatgccgtggacagcgggattggtacctgtgatgatgctctggtggcagggataggtaaaggtaggaaacacactctgcacgccctggcctgcaaaggtaccattctccacaaaatatttacttatattaggaaggctgattcccagacgttcctgttcaaaaacaaactccggcttcaatgcgtccaccgataccagcaatacacttaccttattttgctccatgacctttatccccctgtttttccggtttctcgaccctgatgcctgcctgttcaaagggctgtatctgctcctttgctgcctcggaatccgtaataatcatccccacccggtcgatgtcgcacatctttaccagtgaattcacgcccagcttggtactgtccgcaatgacaatggtctggtctgaggcctccatcatcttttcctgcacaatgatttcatccatacgctggtaggtgattccccggtcaaccgaaatgccgcaggtggtcagaaaaaataagttgatgcttaatttggaaaatatcatgcctgcaatatcagacacaaaggccagctcctcagggcggtatacgccgcccgttgcaatgagtgtgattccctttgcatcagccagttcatttaaaatagcaatggaattggtgaccacggtcagtgaacggaatgtcctctttatggcgcgggccagctcataggaagtggttccggagtccagggctatggactgaccctccttaataaaacggaccgcaaattctgcaatctccaccttgctctccaggttttccctttccctggctgaaaaattctggtattggatgttctgctccccaggcatattttccctatccgccagaaaagcccctccccttgtacggcgtatcagtccaagggcttccatgttctccaggtccctgcggactgtttcaggagagactcccatcttcttttttaaatccgcgaccctgacgcttccgtctgtctgcatcaggcttattatcttttgataccgttgttctgccagcatccgcaaacgctcctttctgttttgtttccctgctcacctctggttttgcttagtttaacttattttagcacatgtaagcacatcattcaactatttttctccgcaaaacgccacaaattaacttatttattttcgtatatattccacaaaacagctcgttttaactcatcttagcttgactcagctcatttcgtcacatatactaagagtacggaaacaaatggtaaatataatgaggagatgaaaaaatgaaaacaaatgcagacaacagtcaatcaaagaaatggatttcatttggtacattggtattgggcgccgggaccatttataagctgggatgcttaaaggacgcgttctatgttcccatgcaggaattcatggggctgtcccacacacagattggtacggccatgagcgtggcagggctgatttccaccttcggattcctgatttccatctatcttacggaccgggtatctaaaaaaatcatgattcccatgtccctgctgggtatcggattactgggcatcggtctttccgccttcccgccgtactggctctttctgttaatcaactgcggtcttgccgtctgcgcggacatgctctactggcccaccatgttgaaggcggtccggcttctgggaacagaggaagagcaggggcgcatgttcggaatcatggaagccggacgcgggcttgtggataccatcattgcctttggcgcactgggtgtcttcgcattaatagggagcaatgccgccagcctgaaggcagccattctcttttactcagccgttcccatggtaatcggcatcatcgcctatttccttcttgaaccggatgagattaaggctgtcaatgctgccggtgaaaaggtaagcaaaaacaaggctgccatggataatgtcatgctcgcccttaagaacaggaacatctggctggtatcatttaatgtatttgccgtctactgtgtttactgcggacttacatatttcattcccttcctcaaggacctttatgccatgcccgctgtcctggcaggcgcctacggaatcatcaaccaatatgcccttaaaatgctgggaggccctgtcggcggctatctcaccgacaaggtcttccattcagcaaccagatatcttcgggtcgtattcgtaattacaggggcggccctgactgtcttcgctttcctgcctcacagcagcatgaacgtatacttcggcatgctcatgaccctcagcatcggcgcctgtgtattcagcatgcgcgccatattcttcgcacccatggacgaaatcaatgttcccagggagataaccggctccgccatgtcgctgggttccttcatcggttatctgccgggcgcatttctgtactccgtctacggaaacattctggaccgcaatccgggtatcagcggctaccgcattgtatttctcatcatggctgtgtgcgccggcgccggtttcctgctgagcagttacatcctgggtgtgattggaacgaataaagccatcaataattaatgccttttacagccagcactccgtcggataccccgaatataatgttcggggttccggatttccattttcattcatataaaacttggtttcatccgtgattcctgcaaatccgccctgggaccgggaccagaattcgatgccccttcttcagcagatatccgtgattcatcacaaggaccgttacctctccacctatacacagtattttcaggaattaatactgaaatatttccatgaggttgagcagattccgattgatgagctggtgaactcgtcctctgtttctctgcagtgaaaagcaccaggcgtaattatattgcattaaagtatcgttaatattaatggcgcaaaaagtacgtttttacgtggttttttggtttgtttgtgactttactgtgtctaatagggtagtataagaaagtaggaaatggtatgaaattaggcgggcccggtcattccagtacccgccttccacttacttctctttctccttcccttcctgaatccgtttccatatggtctcaaattcatccaacttcgggtccgggatgggtaaggggacggtcatgcgtttgactgcttcaaattcttttagcagttcttcatctgtaaattcttccaactgtccccttatcataattcgaaaaatctccctctcacaaattattgcaatcttttatgtattatattttgtattatattatataatactattttatacgcaattcggttaaaaaaatggctctgggatgcaaatcccagagccgctttgtctacagcctgagggccgaggattcttcccctgcccgatttttctataaacccaatttttcaaataatactttatttcttttcttcgagtcatttatcattttatcaaatggtagaacttcaatgtaagcattgtatgaaggattgttaaggaaataccccaatccgtcaggtgtagtattaaatcctctctgccttaatatcctactcaaccttgaattttttgatataacatcacatacagcatataaataaaatttagtatttggactggcctttattggacgcccagctttatcctttgcctctcccgacattattttatccacataatcaagtaattgagtaatcggattttctgagtctgtatagtcgtctctcattggacgctttaattcgaataatgttattgtatcaaaaatcgaaccatcattctcactttcagaaacagcaactggcctatctagtaccattatgtcagttctttcttgtctattatcatttgcaaatggtatatcagatgaaatgtaattactatatgccaatttttcatcaatcaaccataaattgtggttgtcatatggttcttcatcagaatctttcctcataggataaataaggttatgaataaatttttctttttgaaatttcccatcttcccccttttttatacccatctcaagtaaatcaattataacctttctatgagcaatatattcagctaatgttgccccatttgctgcgttcacttttttcatttgtttcataaaacgatgctcatattcttcattgttaatgacacccttatttaattcatctaacaatttttgattctgctcttttaactcagaatcaaactttcttttaattttatgcaattcctcatcaagcttatcatctgatagatatggtttgattttcagaatctcatcttttttatatttcaaaagatgcctgtattgcggagccagattggttgcataattctttattcgcttcattttattatctgcaactggttgtaggtactcactcaagtacttaccaatctcgataagggctgaatccattatctgtttcattgaaatctgatttacatacggttcagtaattcccgtaccatctggaatgttaaaggatagtcggttcatatccacattttcatccaaatacttacctgttaaaactcccaaatataaaaatccattatctttatagatttttttatctaaatctattacatactgctccaattcttttatgtctacaactctattattagcacacataaaaagcttatttccaccgaccgatttttcctcagcctttacatgtaataatttaaaagattcctctcctattattatcgtaacttcattatcttccgttttgatattttcatggaaaagattattaagatttagtgtttcttcaccatcaatcaatttaacaattggacatgtatctgcaataaagtatatcaagcaatgatgaattatatgcatagcaattgtcatagcatttttagggagatagtttttgtaaggagataggcaatctactaattctacagtagttaaattatcttcttgagcatcgcaactttttaattcatcgtcaatttcagtactgtcaactagaaattcaaatcctcgccttacatattcagtgtcatcataatatctgctatcgataattgccttcttaaagaccaataaccatgaaaaacgcccaacccctttaccacctaattcagctttatatgttgaatctgattctgtaaatgatttcatatttgcatcattaaatccaattccattatctttaatgataaaaccagttatttctggtaataatccaggaactattggtaaagtaggttcaccatttcgaacaatctcaatcgttatttgggccttataatctcctattgaagttcttctttcttctatggcatgaaaagaattcactaccgcctcatataaagggaacaatggttgatttttaggtagcggatagttcttcactctccctttaatattcacagaaaatcccctcataatccttcctcctgtacctttatacttagaataagtatatgatatacagaaaaaaatatcaaatcaatttttccaatttacatagtttctttatatacattataagaacatatgttctatttgtaaagaaaaagaatattattgctcacaacaatcagaactcccctatatgctgctccccatctggcgccacatacatggcacattccagcggatgtccggcccgcggctcaaagtaataatccttaccaccaattacatgccagctggtcagtgcatatccatccgggttaaaataatacttgtgatggtttataatctgccagcactccttgtaatactgtgtggtgctgtatgcataccaccatccattactatcatggtgccatcctgtctcatactccggctgctccaccagagaccagtcaggacgtccataaccatcaatacggctgttatctaagctgtactctttgcagcacacctctccgccgttggcaaccacctcgttaccagcgctggtgttgccctcaatggtcctaaccttggtcatggtgacctcatagacgatgcctgtatgacagatgcgcttggagtttttaaaaaatatctggtctcccggctgagggttgtccttatggtactggcctctggacttataatactgggcggacgtaggggtataggctgaaaaaccgcctcccagaagctgtctggccgtcacctgcccaaaggcctggacgaagcaccagtccacaaacatgtcacaccacggctgcccctgaagggatggatacaggtctctggcatacttggtgtagttgctgctgcctgcattagcggtcttgctgtcaagctggctgttactacgtttctccagatatccaatctcattctttgcaacattcagtaatttatctattgatttcataaagcctccaataaaaaaaataaggcccggggctattcccaggccatgaaaagttgtgacgtcacaagttgcgatatcgtaacacccgcttaaccccgcggcgggagatatgcggaccacatcctctcaggtatccatttttgtcttatcttcaacctgccccttaatcatcctggccagcggcattaaaaatggcggcatggccacgccgatatccagcagattttccaggatgctgattatctcattacatataagccatactgccacgatggtagcaaccacgaagggcagtttaatagacagtcctacatactggccggcataattaatcagcacatccatagcccatcctaatcccaccaatatccacatacctatcttcttgacgatgccccacagtcccttgtcactggtcaccagctcattgcgccgttttgatgccaggataccggttatgtagtctgtaaaattcaatccagccagtataagcacgggaactgccagaattcccaaccatccaaaaatcatgctaaatgctgcaacaaacgctgctttcaccttatccattttaatatacctcgcccttctttattttgtgtagtcctctccggtaatctccttgtagtccgcctcggacagtttacccgcggccaccagggccttaagccggtcaatgtcccataatctcgggtaatacttctgcgccagtccttttacatccatggtctcacctcctataagtctgtcccggtcatcacagccaggaaatcaatgtcagccctgttatgctccaccgcggcctctacacccggctgggagagcgttaggagcgccacacggccatatacagcctccgcagtgacggctccgtcctctccgtactgctccggggtaataagatagttgtcatcaatactctttgggtcattcagtactgtataaccatcgtacatcagcaatgtgctgccatcattattgacagtcttaatctgctccgtggctgcagcatccgcaaacacggtcacgatgtcctccaagggttcctccgcctggaagataagctgcagagtgtggggtgtggaggacgtgccgccgatgaccagcgggtactccttcccgtttttcaatacaatcttttcattcatttatttttcctttccgcccagcggccttccgggcaataaaataagcccctggtttagggacttggcttgcgggttacaattttgggaataggaagctcattcttttactctctgtttttttatccccctttatggtaaaatccaagtaggaagggggtgaaaatcatgtactacatttgcgctacatatgacgatggaaaatttgtggaatgtaataacgttacatcaatctcttttaacggaacaagtagtcttataactgtatccgaagagaatctcttaacacaaaatattccatcaggcaaaacattgtgggtgaaaacgcaaaatggttcttataccgttcgcggcgacggattgcgtgtcatcgaaataaggaaagagtaactctacacaatcacctcaatgcaaaactcagcattggggtgactcttttttattacctcaatcacttctaatgtttcttttattttatctgaacttcctaccttaattgtaatcattattggtttcataattcctctctttctgctgtttcaaggacagctcctatattattcaaaatagggacctgatttgcaggttacgattcattttttcttatcacaaatagcaattttatgactttaagcaataatacaaatggacttaaatttcgatcataccaaacgtttgttgatatacaggcagacttcgttgacggaaaagtctgtaatattcctttcgatataacgctagccggattaacagaaaagccatatgcattcttaatcaattcatgtagccaaaatggtaggcaaatacggtatgactgggacttatccaccaaaactgtagccattgcaagtattgagttcgatgcacaactttcagtcggaactactattaggcttggaataatcattgtaggtaaatgattatttgataggataaatcatctcaaaataaaatatactgttgcctttagctcctgaatcaatcgttatgttgccggtgtcggcaatcactttaaacactccatatcctcccgcaccatgaaacaaacatactttttcctgggctgatataggcaatccgctgattaccaatgtattattaactgttgtatcttgcttcaaagtgataagagcatttactacacattgttttcctatagcataataatttgccgaacctgtggcccaatcagagtttatggttgccggacctgttttaaattctaaattgctatctatgctatcttttacctgcttaaggtacgcgctggatgggaccttatttgtagctgtggactccacctgcacaatagctgtcttttccaatagcttagtcataaccttatcggcaatgacatcaatcaaggcctgcacagtactactttctccagcatttacagcaatgccctgggtatccaccgcggtcacactggaggcggacatatctacgttatccaatccagcagccagggcgtccagctgtccttgcacattcgtgcttccaaggttatgtgtatctgttgctgacactgatgtggccgtcccgtcaaatccccccattcccgcagcaatatcctccaccgcttttgcacttgccgccgcatctgccgcgctcccggatgcagcggacgctgaactggccgccgcggatgcggaacccgctgaggccgtggccgattcctgggcagatacctttgcggcattggcctcctgcagggtcgtattggcctctgtgatggctttctgtacctcctccgatgccttagtggctttctggctcgctccgttggcagtagtcactgcctcatccacatgggttgtattagtctcaacttcttcgttgaccttctcggccaaggatatcatactttcccgaacatcccgcccatacaccgcagccctgaagtcattaatctctttactgatgtcagccatcgtttatcacctctttcttttttccttgttaaacggtctatctgcttctgctgggcctgtattgcaccggtcagaagagcaatgtaattcatataggggatacagtaatacccatccttatctatggatgtcaacggcaggtcaatccccagctgcttctgcaacttctccacgtcctgggccacaaatcccatcatcggctcaccagtctctttcattacatatactttgggatgcaatccaagtaccagtgccagagactgcccgtcctttaaaggttgtattcttttcttctttcgccggtcggatgtttcgtagaatgacccgtggaaatcacccatgaaactgccgtggacatagctgcctgtactatacataccacctatgttaaacgatgccccgctggccattatttggttcgcaacccggagcgtattaacattaatcaggttggctcccaccgttgtattattacttgtaccgtcaagagtaaggacaccaccggatgtcagcttgaatcctggcagtgtgatactgcctgatgtcatgttgatgttaccctcattgattgttattccgttcttgtcaaatcgcgccagctcttccccatcagtattttttattattatgactccatctttaccaagtcccttcccaccaagctccaacgtccctccacggattcggtccgccagcatctgaccggcagtgataaaatcagccaccaggttcccgtctatggtccatgcattcttatacggtccattgatgccggttgtcgaaaatccgatgccattctgattgaactggattacattcgtagcggtctctttatccggcgtgttcatgatgaggatacgccacggtgtggtcgtattcccagtatcaggttctatgttgtcaatgacgacatagcctcccttacctcccataatgagctgtgtggcattctccaccctgcggttaatctcctgggccgtatcttctgccaccttctcaatgcgctcagatacagctgtctggttcttgaccgtggtgccagtcaaggtctcagtctgccgtcccagtgtgatactaccctgtccagggtcaagcagattaacttctcttcgtgtaagcaggaacttctgattgattccatgagggtcactggatacatccgtccagaatcctaattgaaattgttgtacggtgctgtctatggctgccaggtccacagcagatacttccatggaggcaggaagggttgaagcctctttgaggtattccctggacttagcaagcaatataccaggttccgtcacgtcgtcccatttctgatatccccatattctcccgtactgttccacggcttccgcgttctcgatgtagtctacacctccattaacggatgtgatatctactgccctggactgtgtctcccccgactcatccttgtactccatgtctgccccctgaggaatcagacatgttataatctgcgtggcatctacatagtgtgtcaaatccagcaggttctccccgaaccggattacctggctgttaatcccgccgtaatcccacagatagtccagataacgcactcccgcctcatgcctgacacggagatatccgccaaatgattccggcaactgcctcaatagtgtgagcgtgtccgaaaagccctggacggtccactctttgtatccgccatccccactcaccactatatttccttttttaatctgccggctggcgttcacctggctgttgtgtacgtcaagaagctgtcctatgtatccgtctatacctccggtatacgtaaaggggcgttgctgactgtccaaaagatacgtcagctctccctcacaggtaaccgcgaccatattatcaaagtcttgttccggtctccacatccggccacagaatacacatgcgccatcatcataaacaatcacctcagacgtcaggactttcaattgcttataatatggatgccctttgtacacccggaatgtgaaagagccggcgcttcccatctcctgggtaagcactggctcaaatatccgaagcatatcatcaagcggctcgtatatggggtattctccattcacgttttttacatatacccgatacatttacaatattcctcccctgtacgatatggtaaccgtcccggtcccggtgaacatgagcacgttctccccttcctttataacgatgtcgtatatcttattcgttccttgtttcagttcatagtccttgccgccatagctcaccgtcatagcagctgataccgtaatttcaggaataacccatctctgcgtgcctgggacgttaatggacaggctgccactcacctccagttccttataatcacggattactcctttctcgaaggagaatgattcccataaccagtcctcgtctgacgccgtaagctcatacttataagggtcagcattcacgctgatagtgaatgttcccaaggtccttgctctggagtattcagataccgtcatgcgcccggcataatagtacatcgggtcatcatcgaatattagttttccttctctgccgtggaagtttcgtaggacttctgaaaacacctccggccacttgtccatcggataaccgcatccaaaattaagagtaattaccctccgttcatatataatccggcccgcaatcgctgtggagaggtccagggagccatcggcccccggaacatcctgatagattgtctttggtaccggcggctgaacacaatgtctgtttgccagtgccatcccataagttgacagcatgtcaatgccgtttatgctcacgctttgatgtatcatcctatccgctccttaagggcctgtacctggcccaatttccggtccatttgtcccgcagtcttgcccaccagggccttcccgtccatcatgacgtacttttgggaggcaatgtccggaagatatgtctccagcaatgaaatgacctgctgtgtgacgctgccattctgttccccgccgcctgacatatccatggtcatgacgtccatactcccggccagggctgccatctggtctgttacgcgccacatatttcccctaataccttcttccaggccctgcatcatatgaggcatccattcttcgtaatagcggagcggccccttttccggtcgggtgaaatgcaggtagtcagagaccgtgcccgccacactccggcaggcttccgctatttcagaagttttactcttaatcccagcgacaaaacctttcatcatatctcctgaccaggtttcagccaatggggtaagtccctccattatagattgcgttttattagccacatctgtcatcgcatcaacgacttcgcccttcccgccatcaattccctctgccagttttcttgcgtattcccctccagccgaccgatatccgtcattactttctgcagcagccgcaagagcgttcttccctaccgtttcccttatcacatctggcaatctgtcaagctcttccttgcttcggtcaaccaataccttcatttggtcaacatctgcctgcactacacccggcgctcctgcctccacagctgctctcatagcctggtatttgtcagtaaagtcttgcaactgacgctctaacgaagcctttgttgatgattccgccgtctgaaaactattgcttgccattaatacagcgtcagccaatagttcttgattatcctttgcctcaatcagcatatcttgattgctgataacagttttatatccgacataagctgtttctgcgtccagtagtgtctggtccaattcagacagtttagcctcgtatcctttagtagtttctgatgcttcctttactttctcagcgagatatgccgattcgttggaaagtccaagcatgtgaacaattccgctttctcgtagagcattgaggtcttcttgaagtaacgcttcccgacgttgcgactcctctaattttttggttgtttcttctacatccttttgtgcatcattgtatttcatgaatgcatctgtcctattttttagtgcttcggcgtaagcttctgcattagcatccattaacgcatttgcctgtttcttgagaatcaagtcatcaatactgtcacacatatctttgtaattctgtatctgatttccagtcaactcatattcctgtcccagagccgttgataattctcccagaatatactttgcccgttcttcgtaacccgcttttacatttccattttcatccgtaactttctgcagctcactaaacagctcctgttcctttgttgcttccgcttctacactatttatagcatccacacgactttggttcatgagttcatatgagctgtacaattcatctatcatttccttatggtgccgttcctggtcagtaagctccacggctctatcataatattctttggttctctcttttgcgtcatatgccgcgtaagcaattgctcccagggcagctgcggtcaacattatgggtccccccgccgccgataatccagccagcatgggaccaagcgcagtcactgcactcattaccgcgccgatacctgtcgataccttcccaatagcaatcaataaaggccctatcgcggccacaatcagaccaaccgtaatgacagtctgcttctgtgaatcctccagtttattaaaccagtccgtccactgctgtatctttgccacaagcgcccgtattttaggtatcagcgcgtctccaatcgcgattgctgcctcctgcagctggcttttgaggatggtcagctgtccgttgagattgtcctgcatagtttccgccatatcctccgccgcgccatctgagttggctatggcatccgacagtttcttgtagtcgtcctcactggcattgataatggcaagcataccgctcatggcttccttaccaaacagggttgccgccgctgcggactgctgctcctgggtaagcccttcaatggcctgagtccccagagcaagagcaaggttctgtgctacctgtgctttattggtctttttggtcaccttgattcccagtttatccattgcctgtttcttaaactgtgcctcagacatatcttttatctgctcctggccggcatacatggcaagctgaaaatacttttcttcctccgataatcccttaagcgtgtccccgtacccatccgcaatagcctgctgctccagggtagccagacgctgggccttctgttcctctgtggtgacagcaaaggattcccgcaagatttttaatgtctcatccagagacttcattgaaccgtcttcattggcaatctcaatccccagttcattcatgacgccttccatggattccgtgggttttaccatattggtgatggctgctctcaactgggtacctgcctggctggccttgatgccactattggccatcaatcccactgcgagagccgtatcctccatagaataccccagagagccacaaacaggcgccacatacttgaatgtttcgcccatcatctccacgttggtgttggcattgctggaggccgctgccataacatcggccaggcgcccggcatccgctgccgtgtatcccataccggtcagggcgtccgttacgatatcggatgtggtcgccaagtctgcaccggatgcagctgccaggttcatgattccgctgataccgttcagcatgtcatctgttttccagcctgccattgccatgtaactcatggcgtctgcggcctcagatgcgctaaatttcgtctctgcgcccatctccctggccttatcccttagccggtcaaaatcctcacccgtggccccgctgatggctgacacattggacattgattcatcaaagtctgccgttgtctttatcgcggcggctcccacgccggccacagcagccgtaaccggaagaaatttcttcccgacgccttcaatctcctgtccgactttctggaatttctctccggccgcactaatctgctgcagggtagcattggccttcccggcctggtcctccagggacttaagctgctgctccgtctcagctatctccctctgcagggcgtcatactgttccggcgctaccgggttcccaaattcatccgatacttccttagctgatttctggagcgtctttaattcgctggaggtttttttgatttcctcctgtatggcatcgtacttctcctgagatatctctccgtttgccagctgctcatcggcgttcctggactgttcttttaggtcgcccagtttttttttggtctcgtctatctgtttcttgattgggtcatacttttctttccaggcatcatagtttgaggctgattctgccacctgcttgtttgcctctttcagggtatccagtttacccttagttccctgcacggcctctgccaggagcttctgtttctgccgcagcagctccgtgttggttgggtccagtttcagcagtctctccacatccttaagctggccctgtgtgctgctgatttctttgttgacgccgcttaatgccttgtttaaaccggtggtatccccaccgatttctattgtgattcctttgatacggtctgccacgataccacctccttaaaatttgtcaaaatcctcctgggttgccaggtttggatacttatagctgtcattttgtgactctgtaaacatgtccaggaccagcccaatggtgagcaggtcgaggtcactaaccgctacccccagctgggccgcccggagcatgaacaagggcgttgtcatttcccggctgctcggcttcgtttttttttggcctccacatctgtctcaatgttcagatgccacaggtcaagaagctggggcagtaccgtgtaaatcgaaaacgtattgaactggtccagccactcctccggtgtccctggctggttcgggtcagcatgaagcgccattatgtatgccacattctcaaacagctccaggtcactgattgggatttcctcgccttccacggcctttcccagacgcattaaatcccggaagatatcccgccggaaccgcgcccggtacagccttggtatggcagccgatgccttgaacggcaccagctttccatcaatctctatttccttgcttatcatgtcttacctccgttacgctcctaagccggatgcggctgtctcatatacattgtcataccaaccgttataggttgcctcatccgttgtatcaccggtccgtgctttaatcctcccatccggaagaggtgtcgcagagatggtcagcgtctccgtcaccggctcaatagattcctcttttgtctgagactccacagacggcctggtggcgctacagttatacagcacatgtcggatagccttctcatcaccgtcaaactcaaacagcagggcaaacgcggtctgtttggcatcggcattttctaccaggaccttctttccgtctaatgtttcccccaagatgtccgtccggaagctttccggcagcagggccacctccaggtccccctcatagccgttattggaagctgcctgatagtaggtgattccatctgcgtaaaacttggagatgtcaccctgggcatccagggatatgctgacagaccccttgatgggtgtcggtttggcaaacttgattgccccatcctctcctgttgtctgtggtgcataatgcacgttcttaaggttgtacttgactttattcattgattaatacctccatttcatacagcacctcatacatcttttcagattcaaggtatgtctctgttttctcatagaaaaagccatgctctttcagcacggcttccactcttttttccgcatccgggtcctttctatccgtataaagttctaaatccagctcgttgataccctgatagacaatcccgtcagcggaaaagttattggtttctgggtacaaatacaccaggtatggtttttccggttcccgcccttcctcgaaatgatggtaagctgccgggaatccggctgacttaaccatctgatacacttctttttctgtcattgtgataacctcgctttcagacgtttctcaaactctttggcggcctgcttctccgcagggcctatatgcgggataccttctacccggccaccgccccgtttcgcatgacctttttccaacagatgggtgaggcccggctttttcttgttgtatatccggattcctatggatacggcattttccgattccacctttgaggcccatccatccttataatgtcccttcctgctcccaggcccatccggggatgtctttttcagttccttcacggtctcctttgcaactgccctggcttctgcctttgtgtcggcggctacctcagaggcatactcctccatcattttggcaatctctgttcccagagagtcaatcctgattcctgacatgacatcactcctttgctgtggcacggattttcacggtttcatttttatactggacattatcaatactggtgatgtcataagccttaccccggtgtaccagcctgtaccccttcgtgttcatggcccccagcagcggatgataacgcagtatgaacatgattgtgttctgggcctgtgtctgcgcggcctcccaatactcggagcctgacaggttattcatgtaggcgtatccacggtaatattccgtccaggctgctatctggttcccaatatcatcctcggtatagccattcttctcaatcgtcaccggctcccggtatgcccctgcattcatggcgccacctcctatagcaggttctcacaatacatcccaaggatggtgtccaccacccggttgacattgttcttatctacggtcatctgccggttatcgtacatatcggagacaagtaccaaaacggcaattgtgatgtcctcatgtgtatcaatcgcagcctcatcgagaccggtatatccctttacatagtccatggctgccggaaggaggatttccagatactgcctgtcaccatccgtcaggtatgcctcttccgtccgtatctgccgacagatatccttaagcgttatctcgcttactttcatcctttacgccctttctcacagtaacctgctcgatatatccagcctgagccaagtcgcggattaataccacatctatgacttctctgacctcacccttatacatggataccgcgccggaaaatgatttcagtgccttgaccttcatgtcctgcctccttaatcggatgccttcatgaccagtttaacaatcttctgggcattctcgaccttagcatcaaactccatccatgcaatcacacctatagcatgttcatccgcatatcgttcctggaggacctgcacggatgcgtcctcggacagttttacagccaggccggacagatccccatagtaaatggctgtcttccccgcctccattccgtccatttggtctgacacataaaccggctttcccaggagagtcgtaccgaagggggacgtgatgtcatcctgcatgagataccggtcattaccatccttcagcagacgtagggccgtcctggtcgcgctgttcataatgaatacggcctttgcctgaaaggcatccttcaccttgtccttcagcatgatgatttcatccatcgtgacggcggatgccgccgcggtttccacgctgagggtcacgcccttcaaaccctcaaccttggcaccagtcccatgcagcagttccgcctccaggaaccttgcaattgattcagacatctcattaacaacaaacgatacgatgtcaaactggctgttgtttgccagggacttggacactttggacagggcgccggccaggtatccagtcagttcgatattggtgaacttcccgctggtgctggtaagggatttgaattcctctgcataggccatcttgattgtgttaccatcagctgcatagtacgggattgacagagccccttttacattgtaccgggtcgccatcttatagattgggcagatgtcctccaccttcttgataatccggttcgcaatcgtcttggggataacggcgccattatcggtctttgtcatctcaccagcacgttcctccagggcctccccgcggatataggccgcaaaagcacgctcttccagctcctcctgtttcaggtcctcatttttctctgtgctgataacattcaatttcaagtccctggcacgttccaacttttcaatagtgctgtccagggccttcacctgtttatccaggtcatcaaactgctggtcctcttcttggctgaacgccctctgctccgtctctgcggtggacgtcaggtctttcatctgctgaaccaggtcggcccgctgctccgtaagagactttaagtcctccgcacgatactgcatgtactgccttgcaactgttttctttctcattctgctttctccttctctaattccttgattctattgtgatacttactcatatcaatcgtttcctttgcttccttgacctccacataatccgcacggacctccaatggttccggtgtcagaaccatatcaccctctgccctcacctcaacgctggttccctcatagcatggctgcttgcgctcatctataatggacacctcaacaaggtccatatcctccacgaaccggcgctccaacgcatcgttgatatcctccttgctggcgtcccgttcccggaacccgaaggaccagccgcggagtttcttcttcctggctttttcaatgacttccgggtccgtgacctctgcccgggcatggagtccgatgctgtcctcgtacagctccagatttgtgcttgtggaacctagattcctggtcttgtcatggtttaggagcagctgcacctcattgtgtctgagcgctcgctcaaacaccccaggtacaatctgctccacaaaccgtttcccggtcttacggtccctcataggccgcgaatccctggccacggcattgacatagccttcaatcaccacactgtctgaccttagttcaatcctcatttttctttttcaccttctttctgctccggccctgactctttctgtccaagtccgccggtcttgttcatgttcggcatgtaaaactgtttcgtctccgggtcatacagcacatcctgcaggccaaggcggacaaaatccaatcccagcggcggcagattctcccttaagcgtatctcatcaatctgcatgaatccgttcttactggccgtctcataagcccggaaacgtttttcaatgtcccctttggtcagctctgacgtatccgctgcaaaataaaaggaccccttctctgattcaagaagcaggtcccggttcagggcgcattcaaactcttttaagattggattcaggcagtactggacgaagtttgtcttatcctgctccgtggcgccgccgtttatcatagccggcggcatgttgaacagcttacagatttcgtcactgttagttttcttgttctcgttcagctgcatctccacagacgtgttactggcctcctgaaaatctaacccctcgttcaatatgacgacattttctgtgttgttctggtaaagtcggcgccatgctgcctttaatgccttaatggccggttctgccagctttttagccgacttgacaaaccctttcttattgccaccggtcttgaccagattcttttcatactccagggaatgataggctacgctcaggacttcactgttctcatccaccacactcctgccggaacgtccatcctccgtattcctgagcactttcagaaattcaaagggcttatatttcgtcccttgaatcatgatgtcataatccttaaaaatcgggtctgacgtgaacaggaaggagacctcagattccctgacgtaatgcagggaacgtattcgattcccagtgcggtttatgaaggcatacccgcctttacccatcaggtaatctctgaccagtgcacgcttgaactgaaccccatccagcgtgtccccggtatcatcatttagcagccggaccctggtatcatcctcaacagcttccagttttccatccaccagcctataaagacgaatagggatggttgaaacggtttctgctatcttattcacgcaggccgcaaaggctggcacattcatggcctggtccctggtcatgtagtcatccgacagactggcccgcagcaacgcatcttcgttggactctgtttctgttttctctggttccgggtctgccctcaaccgaaaggaccacatatgcaatcactcctctctctgttgcgatatcgcaactaacacacctgcactgtaaaaccgctgtcatcaaagaggatatcctgctggagcagatacactgagttgataatactcaccactccgtccaccttccccttggatttcttcttgttaacataccggttcatgttggtgtcataggtacacttcgcattctcaaaattggtttccagcagccggttctcctcgtaatgccatttctggtttgccaccatctccgccaataacttggtgggaggatgcagggtgtccgaatgctgccgtatttccaccgttgtataattcttatcccatttctgggcgcttgacagggcattatatcggtcatagccgattgacttaataaccacgcctctggattcctccaagcctgccacgtagtcctcaatcacgccgtagtccactgtcatatcaccgcaggcaatgcaggttcccgcggcaatggctgccctgtaatcaaacttctcaaactcactcttttcatcaatccttccctccggtataaatgtcatgacgtggctcagtatctccccgtcctcctccgccgacatggtcacggaacagttatcgtttgtcattgcaaggtcaacacccacataaacctcccggccttcccagtctatccgcggtaccttgcaggcctttacctggtcaatcgggatgtatgtctcagtcccggcgccctgatagatgatgttacagtgtttggtcaggaagttctcccgcagcttctcccggttgatagccctctgccgtttcagcaataattcatcccagacctccggtatctccaatgccaggggatttccgtgggccaggatagtatcatccgtagcccaatcttttgtattgtctggctcatagagtagggcaaacactgtctcgtcatcaatcaggccgtccaggattttcttggcattgtccacctcgtcctccagcggattgtccgctgttggatacttggttgaaatgataaatcccagcttattccgtatgagtagctggccggagcgcatggcctccaccggataggatgtaggcaaggctcccacttcatcagcgataaacacgcttggttcctttccatccatcctgctggtagagtaattgagtggcgtgtacttcgtctttgtggggttatgcaggatgtaatcccgcagcaccttaaactcgttctcttcaaagacctccacgttagttgccagcaacggctccagagcctccttaatctcacgggccagcgccccatccggcgccacagagaagaacctggaataggccggctccaggtaaaaaagcaaaataaaaagaacagcaacaacaaatgtcttgccattctttctgcaaatctccaggaccgccgtctgataccggcgcatccgtttgtcattccgatggaccgtgcagaggactgctgttataagcagccattgatatccggccagcaccgaatagatggactgaccagccttcggcccctttgccatcttaagtaccttgagaattttatatatcttatccaacagtttctcattgatgatgtatttcttgttcttccccttgtacgtctgcaaaaagtctgcacattggaggataacgtacctcggtgcttttatctttccccggcataccccctcagcatatgcgaccgccgggtgcttaaccttggtcctcgtcgtcctcattgattaaatccatgatggtctttttcttctctccaggcttcactttcgcgatggacagcttcgcccggctctgaggggataggcacagctcattgcagcaccggaagtattcctttgatgcctcggccctggccatccggaaggaattctcaaagagcagttccttcttatcgttggcctgccggtccagctcctggatacggtccacagcaatggcggtctgagccagaatgaacaggtccaggtttcccaggatgtcggcctcttgcaattcggccatgatgtaattaaatatctccatttgggattccgtcaggtacagcggcggcaccagtttgtcattctttccgcggagcttatcctccagctcaaggcgctgcgcctcttcttcttttgtaattgtgccagtctttaccctggctgattttgccggccttgccatcctatcaccttccttctgggccgaaattctcatttctaagattttgtgtatttaaaggtggggcgtcggtgtcccgaattgttcctattttccgcacaactccccggggggatagccgtcacccctcctgaagggcctggagccgcaggagcctcatgacgtactttccaattgcatcctctgctttcacattatcacctgcctcaacagccgctactgcctcatccaaggcatctgctgactcccttagcactttactcattttttttaaccgctctgcatcattcatggttctgacctccatcccttatatatgttatagtctcagtagcttttccgtccgcatagaaaacctcccgctcttctgccggaaggataattctacattctccatatgggattgtgattccattacattcagggcatctatgtccatacgcctgttcagtcttatacactgtcatgactccacattgcaggcacttgatgacaattcctttcattggctctcctcctgttcatctattatttgtttcaccacctcatacggtatctctccactctcacacatctcatggtgcatcccgcatatagtcagcaggttgtcatcatccagacgccggtcgtagtctgcttcaatcggtatggcatgatggacggataggttctcatagttgtattgccggtctgtaccgtaaaggtagcgaatacacacctggcagaggttcttgtcccgccggcgtatctgctcccgtttctccctccactttctggagctacggaaccggtctatgtaggttatcttcttttgatgtgctggcttcctgccgcagtcatactggctgtcatggatgcggccacagtatttacaagacttaagcatttatatgaccacgctttcctttcacacataaaaagcacctgcttctgcaagtgctttttactatcaaatattttcgtatccacaaagaagggctttatgggtttctctcagtgctttttgctcctgttctatctttttatccaggctatcaatctcatttatatacttcctcagggtagcttctttgagccttttctgcattgccaagtgttgccgatttgcaagcctaatccgtttatcaattaactggcgtaaattagcatctgtcaacagtacaagatattttgccctacattctgggcaagaaaattcttgtgcttgtaattctcctgatagctcctgcacgcttaactcagaaaccgtaaacttgcactggcatttgttgcattctatattgtccattgacaatccctcctcgtttccggtatgcccaattcgtttcatacattataacacagaccatgtgtgccattctatgccatctttaaatttttaatagccatcgcatgaattctatgaacctgcctccatttgtaatccatcctcacacaaatctcttcccatttaagccccttaagataccggtatgtaagcaaatccttttctctctcatcctccatagcctcaatccgcttctgcacctcctgaaatgcacatatccggctgtaccgggctgcaaccagttcctgctctatctcatccaccttcactgcataatcagacaggtccttcttatccgtcccgtgcggcatcccgtcattcgtgaccgaaggagacattttattccgcctcagttcttccaactgctcttccaaacgccggacccgccgcttctccttctgataggacatcaggaactccttcttcttttcattttctgtcaattccaattcgattacctccttacagttccttggccagctgattcagctccgccctggcctgcacaatccgcctcttgatggattcctttgtattgtactgttcagtgttgcaatacataggcggatatccgttcttgttctcaaaggtctcatattccttgatgctgtccaccagagtgtttaccatactctgtaccatcatgattctatttattttcttcatgctgtcacttcctttcttcaacccgtagtctcttttgtccccataccgcgtccagctccatgcagaatctgaaatctcaccttgtcccattcagccgccaaattgccggatttaacatccccatagtcacctaaccgcttgaatgtatatctgccccggtatgcttttccatctgccgcgcagtgttcaggtacctgccggccgcaatgaagcatagtctgtatatccatggtcgcatacgaaccaacaaggcgcccgtagtcatatacgttataatatatctgcctcaaaaaagcatccccctctcaatacatcaacataatgcccttatccgtgagctgctgcacaatcaatttaatcacttctggttcgtacttacccggctcctcctcaaattcccttatcacatataacaggtcagctactccatagcccctgaccacctcaagtttttcttccacggtcagttccgattccttcgataccttatacgctctcacattatcccctccatttccccaactccgctcttcaagctctgtcagcagggccagaataaccttcttgcacattcggcagtcatattcacacataacctctttggcatcctttaccaccgcatcccacttgtcagattccctgggcaatatctcatccttccacttattccaaaaccagttataactcttccagaagattcccttcaccttatcgttatccatgcatcctccttaatcaaacggtagttcctcgcctaaaggtatagactcaaacttcccggtatcattttcaaatagtttcgccatttcttccttccatgggtatatcttgttctcccccgggctgttcctgaggcgcttcgtgcaagcctcaaagaataacgggataaattcatcctgtacaccgccgtcgcggtccttgcatatttcaatcacattggtggactggtacaaaaagttgtcatccttccacttgaacatatcctttgtcagacgcttgaaatcattgttgaccctgtgcaggataaaggcattatccacacggttcacgatgtcattgctgccggatacatcatccaggcgaaggaaccccacggacttcctgggatgcgccacaaacaggatatggacattcgcagcctttgcgaaattctccagacattccacgaagtggctctgctgctggtacttgtcggtgcccatctccatcagattcagcgccatcatgttatccagaattataaggtcaaccttatgctccacaacacacttacgtatctgctccatgatggaactgaactcattgccgtaatagttgttatagacgtacactttttcatccagccatttggatataacctcgtcataaggttccggtaccacgtaatagttatcatactgggtttctttcacatacatcttcccagcagcctgtagaaggagccatttcagcaggttcttaggcttaagctccccgctgaacaatgccgtccgataaccttgttgggaagcctcaaccgttatctgtgaaattatgctggacttcccggccgccctcagaccactcaggcaggtgacaaaccctttcttaagcccacgcattttctgatctatcacatcgaccccagtcttgatgaattcttccggcggttcctccataagacggatctgttccgtggtaaagaataccggctggccatccaccatcttaatttctgtctttttctcgaccgtgtaatccgggttccgataattggggtgcctttcctccctcacatactgccggtcataggcatccggctcaaacatccggcggacgtcctgccaggtcttgtcagcacaggaattgtggaagcagtggaagccaatagcgccattgggcatcctgaaaatgcaggcatccttcccggcgtggttcttatcaaagggacaatgctccagtatgtatttggttccgctaccatagctggccttagtgtaatggagtccatgctcatccagccaacggtctaaatcaaattccctgggattaaaccggttgtacccctgtggcttgtcagggaccggaaggtatcccgccagcttctgtagcagggccttatcattctgttttggattctcccgcgcctggacgatataactcatgcgatgggggcgctccggagtattggcccctttctgcgccaaggtaccatacagcttgcatatcctggcagggttgaagttggccgtgtcaatgtcaaccttgtcgtcagaaaagaatagggacagtaccgccaggcagtcctttaccagctgcttgttctcatcattcattgcaaggcaaatgctgtacaggaggtggaccccattcccactaaaggccacaatcgggtcatcaaatcccgtacgtttcataaaggcatagacctcattgcatttttctttcgcatagccaatctgctcctcgctggatgacgtgccggccgcgcggaccggatccatgtccaccatcagccagtcatagcagtagatatccgaatcagatgtattgggttttgcattgcgcacaaaacaattcctctgctgcctggaatggcattcgtccttaattccgttcagtgtaatatacacattgctgtttccatccatgcgaattccccgcattgcattaatacaggtatctgcatcgcggaaataaccacttgcgtttccacccccggcagcaatgacccggatttcaaaaaggctgttttctggtttcatgatggaaatggctttccggatttcattctcatcaaatttcattgcaggatcctcccgtctttcgtttttgtcatgggtctgtcttcatcacttaaatggccggacccgccattatcctgtgtcctggaaagccatccattgatgaaccgattaattccccttgcagttttctgctttttggggttgctgtccaaccaggttaacatcttccttagctcatgctccacatcgactgccgggaatgcttttgaccagttgccaatcctatcccacggcacattatagaaagtactgtcaacaagagggagaaaaatatcgctacagcctggagcaggcttgcctggctccgggcagatatatttactttctttttccttctttacattcttttccttctttacattcttgtttatgttccccactggttccccactggctcccgactggttccccactggttccccactggctcctttactggctcccttgccctggaaagtctcataatttacaatgaaaatggtggttctttcactggctctctttttgtccacttctatcatgttatcctgttctaaccgtaatagatagttagctaactttttccggctccatccccatctttcggccaaaaaacgctcactccggtatacacagccgcgctttccgtcaatgagatttccgcgtctgtctgtaaaagtgccatcctgatgctgcgccagcagtattaaatcaatccaggcctgtcctcttgaaaaaggcttgtccatccatacccagtgactttgaactgtcctattcaccttcacccaatttttatcttcattgttcatccgaatcacccggcctgacttcccgaatataaatgtcataatccctttcccaggccatctccaggagccatatgaggtgactatagtcattaaggtcacagtcaaatatgagactgtttccattccccacaatcttgacctgtatcaacacgatgcccactcctttcgccatatatattaaaacaagctgtcatttccaaatattatctgtttcagatggtgttttccatcgtgtctcccacaaactttacatgaatagtcaccttgtatgtttgtaaagaaatactgcccacatgtcttacattgacacagccaggcctcatgctcctggaacagaaagccaccctcaaatatcttaaatttaccttggctatcgcccatgactatcattttcccggttttctttgacatgcttctgcatccgatgcgccctttcccgcctcccggacgcctttggtccaccacaaaatatgtatcctgttctgggaaatagaaatctgcaccttgccatatcccatttcctctatcactttcaggacaatatatccattccatatttctgccctcaaacacagatgcccacaaagagcacatgtgataatactgtctatacttttcaaatcttaatagcatttctaatttatgttccacttaaagcctccttcccgggtggaggatggtcagaaagctccaccctgtgagtccaacacctcatgcattcataccgtgacatattataagcatgtgtcgggtcgaattaaccagttgctatatgtaaaggcttgcgccgttacatctttttattgacattcttttatgcccttgccataatgtaagggcaggaatagccgcctgtccctttggatgcgcattcagggtgtacgtggtcgagaacggattcctgccggcggaatccacatgcgctgtttcacaattagtgagacaatggtttccgcttttaaatattcttcaaatgtcagttttgcttattaaaatcaatcttacgcaaatccaattcttgcttgagttcgcgaataatatcttttaattgttccttgtcctttgcatgtcttgctttctctgaatacgttcttaaaattcccgatacatcatattgattcattctatttccttctttctttttggttaaatcttaatttttttcatgtctcgttcatataattctcttaagctcatcttctcactttctggatacaaacccagagggcatgcattagcacagcaagaacgtatttttttcttatgagcatccaaattgtcattcccatagtcgcataatgtgtaacctatttgacttgtatatctgtaactacattttggatacattttctactcctcgccaaaatcttaattttgcatcattgcaatgtaatacatagttccactttacattctttcggttttgcctatatccacctgcaggtttccgcattccgggcagtacataacctttccaaccatttcataccttccggaattggggttgaaattatccaggacaaccaatcgttcactatatccatccgaattgtatgtaacggccttcatatcggttccgcaaccatgacatttcattccgttatcctctccttcgtcttaacttgtgacgtcacaagttccggatccggtcccttcacgaataccaccggcgcccaatggtccgtcttatactgcaccgcgcgccgtacctttggtagggtaagggcggccccatccagaagataccgcaggggatgtgccggttcccggtggaccactccctcatgcagcagctccgtcatcaagtcaaaggcttccgcattccagccgctccagaacaccacatgctcgcagacatccgaacaggaccgcagttcacctttgtagtcatatcccttctcttcaaacagccactgcagttccgcatagctggccgattcattcttgtttatgtagtccaccacaattttctttatctcttctttattcatgttggtctcccttctgttgcgatatcgcaatatccaatatttgcgtttatatttacaatacctacacttttatcttcccggcccccatcagatatcccagataaaatacatacttcgtgctataactcgtctggttatactccgtctgaagctcaacgtttcgtccggcatcccagatacaactgaccagcatatcgtcaaatacatccggagctttatcgtctattacagaccttatgtattcctgtattacagggacaatcccttccgatttctttcttgtcagggcctccctaatcttcttctgacggtcgctatatgccgacatcaggatttcatataccttccatccataagctgtactgacatggtccatcacatcagaaataggacaatcaggattattaatatatggactcggataggaaacgatatctataaatttctgcacatcaccctcaggcacattcctattcacataaaggatttgctgcttcccgtcaaacatgactataagtttccccagctctgtgtgatgtttataattaagttggaaacacagaatagacggcagttcctctggagttatgcgtttaactgttatatccttcaatttcatgtcgctaccccctccttcccttgcttgttcctctaccacgtacctgcctcatacccaggatgaagtagtatatattccacgctgcatttacatgcatacccttaaggaacactacaattgcgttaatcagactctccttgactatgtcatccttgcctgtggcatgttctatgtcccatctctgttgcaccggtacaactttacccgtattttcaagaactgttttcagtaatcccttgagatcatctatctcctccacagcgctgtcataattttcagccatccggttatactgctccactgaaatacacatcattctctgcattctgcggcctccttcctgccttctgccagacctgcataatatgccctgttggtcaagctcacaattgcctccgccatctcacggtctgtatcatcatgctcccctatggtcttaagccacttatccacgaattcttccttattgattggaaatgtcatatctgcatgcctcccttactaacactatctaaaacttctcgtagttccctgattttatttaataggtcgaatacaatgtcatttgcgatactggtcttgataccggccgtggtataaaatggcggtgctatcttccacatttctcctgttttttctatatccacattgaaataatcctggtccacgtcgtttaccattacctgaaccttttctgccagaacttcaatatcaagcagtgtattgtcaatatctattatcgtgacattctctttgttttccatcgtcaatcctcttccctttccggctcagaggtgctatactatagttggttgaactttggtatagcacctctgggcctatgcttgtccttaactaattggcgttagttagggacttttttattgtccgtctcacgccggcgccacggctcacaagcctcaactccgtctttgtttcttccaacaccagccagttgtttaccaccaggcctgccttactcatcagtgccttctggctccgggtcggcttcattgctctgcttctccccatccgtttacaccgccctccgcatcatcctgtcatgaagttcatcatgcggcccagaatcattgcaatagatgtctaaatcctccagaacgttctgccattgaaataatagttccgtcaggtcccagttctgatagtcccacaggagaacggcaacgtcctgggcgtcccctatgggcttgtctgccggcaggcgccttaatcggtccatggtatagaagtaatccttagtcccccacttctctccgtcgtattccttctcaaccgggaacattctcagcagctccatgggggtcaacctgccgatggtttccatgacctgctttaactcctggtacctgttttctatctccaggcaagacttataagcttttgtatggttgaactctgcaggattctcttttccataggctttgaccgccaggaatatgtatcgcgccaggtcatcaccctgtagcctttctatccggcgggtgcctccacgggcatctgtaaaacgcctcaatgccttggtatatttcccattgctctctacatgtagcacaattcctgctgtgttccagctcttccaggattccctgatgaatggtaccagtatctggagcggaccggggaacattcttaacatctggattacaaaggcagttctccttgccagtttgcgcaccctgcccgggagtctccggctctccagctccgtcttaaacagctccgtgacgtcctgctcgtcgtcctcatctaccttatatacaaagttgtccataaggtcagccttaaggtctttactgctaatcttccgtaaggaatagagcatgttgttgacagatatggtccagtcacgacatcccttgatgatttcatacatttcattcagatattcaggctgcaggtacgcctccaatatcccgcggcaggcctccatgccatcggcatccacctgtaatttccatggggatggctgaatccgcaaaacatgtactttgtccaccaggcctgctgcctcaatccggtcacagcatggctttgcatatagctccatcccggccttggccatcagtttctgtatgtcaaacagcatatccggaacataggtcccatccttaatatggctcaataccacttctttggtttctttctccattgtccttacctctcctatatcattcttactaactggtccacctgccagcatttgcacatatatgccaccgtcatcagtagtagtacgatgatcagcgcccagtccatccggccgggttccctgtttctgttcattcctgtttctctccttcctctggacgctccagtttctctccgattatcttttctatttttgccgggtatatccgaaactcccacatggtcttaccagttttctccggtggaattgccaatcccaggtccaagatacccctgcgcatgtaattccgaatcttcgccggtttcattcccaggacaggggccgcttcctcaggacttagccatagtcttgtcacagtatcactctccttccattactttatattccgatacactctttcacagcggattcacgttcttaccgcttacagccggatggctgctgtggatggatgaaattgtcaatgtgcggcacttatcattcttcaaacaattccatctgggcatttacgtcccggatttcttcctctaacaccataggtagcttataatccttaataatctggatagcaaggtcacactggcttctcttgattgccttatatgtcttgacatcaaattcccggcggagctgtccttcaacatcgcggtaaacccggctacgcagtccattatccttataggccggagcatcctttcctcccaggaggggaaccactttctggttctttgcccatgtaatcttctgacactctagagctaatagtggcatgtcccgcttaaattcctgaaggtcattgttcacggcatccactttctcgtcaacctccagaatagcctgattttgaagcttcagttgttcaagagcggaaagcttcttatatgatgattgcgggttaaaatacgcttcttccaggttgtcgaactgctcccatgctttctctgtgtccagaatcttacagtgtcggcttgcaccgcggtgagtccagaggtaaagtaatggtgcattcttagcaactaactgactatcagtcaggtagtctttaaatcccttcagctcctgccccttcaacagaaaataatgagttccttccttgaatcgctcctgattccttccaaaattagcttgtacattattggcatctgtttcgtatacctccgccagctgcgctgtggtaataaccttctggcccctccactgaatctcaaccacatcatggtttcctacttttacaatttcattcatcctctttctcctctcttccctcaaacttagccattgcactctccgttaccctatacagtccaccaatccttatagctgatagcctgccgttccgaatccagccccacacagtagctgttttaacgcgatacctctctgcgatttcttcacatgtgtagtatttagacataaaaatcccctccttccttcatataatacttgtattttgttctgttttgtggtaatctactaatatagattatattttgaaaaactaatctattttagtagagcgtggtttaataatactctataaaattagattagtcaagttgaattactctataattttagactaatttataaggagaaaattatggaatttgcacaaaggcttaatgagatgctggaagaaaagggtgtcacagcatatagactttcaaaaacattgggcatacatcaaacaactgtaaaaaattgggttgatggaaatagtaagccgcggactgaatttgtacaaaaaatggcagattttttcggtgtgtcccctgattatcttatgggatggagtaataacagaaccgctcaagaagatgacgaacatttatcactaaaagatagacgcgatattgcaaaggaccttaatcgaataatggatgaaatacgaaatgataaagacggcccattatattatgatggaatagaaattgatgaagaatcactagcacttttagaagcggctctgaacatggccctaaagcaagccaaaatagctaataaggaaaagtataatccaaacaaaaaccgcccccgtaataaatctacagaggcggatgtctaaaatttattcaattacaactgcttttaaatcctttgccaattgtgtagaggccgaagcaaagaacaccagagcttccagataagtgtccaagctatccggagcatacactgcagcgttactaatagcgcaggccaggcttgctatttgatcagctctaccgcttatatcactaattttttcagttatatctttcattatgtatcaaacctccttgaaattcggcggctgacgtgatatagtaatcacgaaaacagtcaccagtttttatgtgtggagcagccgtcaccgtccaaagtaagcggctgctctatttttgtgtcttgatgtcttccggatttcatctgtctgtagtatagcatattctttttctaagcgcaaatgccctaaaaccgtggttttcctcacctaaattgccattttaaataaaaactatcttgaataaaagttactattatcgcataaaaacacctattctcttttaaaaacttctatttcattctaatctggcagttttattaaatcaactaaatcgaaatttagatgattaaaactgctaaacaagctgctaaaagttttttcatttctacgttctgcacaaaataccatacatctttttgtacaactttacattgcttttgcatctgtttgttccttatcgcggtcttgataggtaacatgccaggctttcatctgtccatccgcctgctggtactcaatatctgatggataatcattatcagcaatccagcattttaccctctcaatcaccgaatctgagtactttcgcactgtgccctgccacttcccttttgactcccaagtatccacgtaatcatcctctgtcacctcgatacgccggatgatttcattcacagctttatccgcaggctttccagaggattttacataaattccggcctgccgggcaatatgtaccgtatcccaatactgcttgtctgcaccaatctcaacgagcacagggtatccatttgtttcatagaaacttttcgctgtcaatagttgtatcttaccatcacatccagctttctcagttaaggatgtgaggaacttcgctgctccggtcactgctgtgagggatgggcgcttctgctcggtctgagcaaccttctttttcgcttccttatacttctcttctatccggataaagtaccggcgcacctgcttacccttctggttatgttccagcatagccatttccttggcggtagctaattttatgatatattcctgctttggcctgccaccggtactttttgataaaattgtcgtaaagtctgcatcttcaacggaatcacattctctcaacctgttcttaacccagttggaatattcctgcttactccccaagcactcatacagctccgttccgtaaaccaccttctcacctgtactcgttacgtatacaggcaccagctcattttcaatcactcttaaatcattcatagaaatatttcctccttgcactttaaggcggaatcacttataatatctgaaggattcctgctgttagcgggtttctctgttgagcaatcacgtgtctcgccaaagtcagcgtgtttgctcattttttgttgccaagtcttttttgataaggtcaataacatactgcataaacgacttatcttgcataacagctctgattttagctgccttatgggtggcctcatcgagttttattgcaatctgcttcatggtgcgctcctccttttatattttttattcgttatcgaatatattacaatattatattattcgaatatgaatatgccaagcgacatattgcatttttgaatattctatattaaaatatattcggaggtgaatattatgggacttaatgaaataataaaaattggtacacgtatcaaaagaatccgtattgataaaaaaatgtcacaaaaatttgtagctgagcaattaggtataccgtactctacctactcaaattacgagaataacaatagagagccaaattacaacacgctcaaacgtatagccaatattttaaatgtcaccattccttatctattatatggagaaacgggtattatgtcggcggataccgctgaatacctattgtcattatctgggtttgaattggtagaaaatgataatggcacctatacaatatgcgacattgaaaacaacaaaacaaaaaatcaggtaacagttacaatcaacgatctccaaaaacttgtttatgaaacctctgattatattacattcctaactcaaaaattgtttcaaacgaaatcgcgctctcacgagtaaacggatttccattattaacgtaatttaactacgcataatagtataatacccattttaattacgtgtgtcaataaaatattgaatttaattacgtgttatgctatcctattattgtgaggagaaaaaaaaatgaacaaaaaagcaataggagaatcaataaaaaaattcagaaggcatcgcggcattacccaaaagcaattagcaaagagtatagaaaaatcagaaagcactattcaaaaatatgaaagtggcgaagtagaggcgcctctaagtgttttggaacaaatttcagattgtttaggacttaatgtgattgaacttcttgaggctgatagcggcaattttgttattgaatattggaaaaaaacagacaatgctttgtctgatttttgtaaatctctcggatatgaatttgtgagccatcccacgtcatgtaaccatgagttattaatacattatggctatagttatgaaataccaaatgatgactggattgagtttctcgatgatataaaatggactgtagaagaaaggtttgcgaaactcatggaggaatattcggctaccaaaaaaatattaaaaggatagtctacagattttaaaacgagagggaaacgtaaaccgcagtttttttgtttcaacgcttttagacattgtgattatctagtccgtgccgcatgccgcccgaaaaattctgaaaaaacaggaactttatatggagaaaccggggttcaaagcaagcaaaccatctcctgcgcctgttctggcgacgcctgaaaaaagtcatagcagttatgacgatatggaggcacttaacaactaaaagaaaaagccccagaggctacgagcttacggagcttttgcataagagaattattttataccaacacagtcaaaactaaggaggatattttatgagaaagagttttttgcctatgttaataatgattgcgtttgtttccctcgttgcatgtggaggcagcgactcaaagaaaagctataatgtggatatgacgcaatgtataaaagatttaaaagacggcctaattttagaaccagactattcttttgtaacagattattctattaaggcggatggtgataatttgactatcagcatcgtggttgatgattcaactacccctgaaaaagcattagattttgcggacactatggtgagacaactaaatctatatgcacaaatgcaagattcaaatattgagtcaagcagtaaagataactatggaggattgtataaacaatactccactcttgtaggcgttgcccctcaaagcaaaatcaaaaatcaagatgactggttcgtctatggttccattggaaacggaaatgttatgctaaaattaaacaagcagtataaataacttctagcaaaaagccccaggagccgcgaactcccagagcttttcacatagattctcttaccggacgaatccagtaagatacaattcaactaacacacttgaattatatcattcctggagcgtcctagcaaggggcgtattttttataccaaaaatcagttgcgatatcgcaacggaaaggactgatatcatgccaacacgaagcaaacaccctagactccccaacggttatggttctatccgttacctgggaaagaaacgtaaaaacccttacgccgtccatcccccggcagacatcgacggaaatcggccccaggccttatgctatgttgatacctggatgaagggattcatcgtattgactgcttacaaagccggcacctacgccccaggtatggaagccactctgctgctcccggatgaaaccaaacagctcgatgacctaactcagaagctcctggctgattacaaccgcgtcaagggaattgaaccggacgaacccgaaaagaccttctcagaggtctacaaggccttctacacggataaattctccgaaggcaataaatactctaatgcaaccaaatattcaatcaaggccgcatataaaaactgtgcgtccctctatgataaaatatttagctccctccgcgcaaaagacctgcaggataacctggatgcgtgtaatctaaaatatgccagcctggaacttatcaggaacctgtacaggcaaatgtataagtacgctgacagtcaaggatggtgtgataaggattatagccagtatgtcaaaatcaaacgggatgacgatgatgaacatggtgtgccattttcagatgcagacctgaaaatcctgtgggataacaaaacaaatgaaaccgctgagatgcttctcataatgtgctattccggatggcgtatatcagaatacattggcctcgaagtgaatttacagaaaaagtattttatgggtggaataaaaacggaagctggtaaaggacgtatcgtaccaattcattccggtattctccctttggttgaacgccggataagcaagtatgggaagctccttccgtgcagcgacaaagatttcagaaaacaaatggatgagctactaaaccggcttggaattccaggtgaccccaaacatacaccacatgactgccggcatacattttctatgttgtgcgaaaagtatgaggtaaaagaaaacgaccgtaaacggatgatgggacactcattcaaggccgacattaccaacaaggtttacggccaccgtgacatagaggatctgcgaaaagagctagaaaagataatcattgatttgtgactttattgtgaccaataaaccctaataacatggtagaaagcggtaggaaccggaagttacaaaaacggcgcaaaaccgcataaaacctaccattttcatcctatttcttatgcaaatcataccattctagatacagcctgatattaaagtatcgttaatattcctcccatcccgttgacattgtccctttatcctcatataattccagcaggacaggatatttccatatataaaacaccggaaggaaaatgacatacatatggacgccaccgtcaacgacgatgaccaaattttcaccataaccacacttcatatgttcaaaaaaaggcatgacccgcattcattcacatggatgcgggcaatgcctttttctttccgcacaacactgtcaaacgtgtaaaaggaggagtcattgtgagtattcaatcgtttttcagtctgctgggagggctggcgttatttctgtacgggatgcagatgatgagcaccaatctggaggccgcagccggcagccgcatgaagcagatactggagcgcctgactgccaatcggtttttaggcgtgttcgtgtgggccggaatcacggcaatcatccagtcctcatccgccacaaccgtcatggtggtgggcttcgtcaactcccagctcatgacgcttaagcaggctgtctggatcatcatgggtgccaatatcggaaccaccgtgaccgggcagctcatagccctggacatcggggccgtcgcgccgttgattgcatttgcaggtgttgctctgattctttttgtcaagcaaaaaaaggtccagtttgccggagggattattgcgggtctgggtatcctctttcttggcatggaaatgatgagcgccgcaatgataccgctgcgtgattcccggcattttgtcaatttgatgacaaagttttccaatccctttctggggattctggcaggagctgcttttactgctgtcatccagtcttcttctgcatccgttggtattcttcaggccctggccgtaagcggattaatcggactggacagcgcggtctttgtgctgttcggtcagaatatcggcacctgcatcacggctgtcctggcctctatcggggcaaaccgcgacgccaaacggaccaccctgattcacctgatattcaatgtcattggcacagctgtgtttactttggtctgtctggtgtcaccctttacccagtggatggcctcgttcacgccggataatcccgcggcacagattgccaatgtgcataccctgttcaacattgttacaaccctgcttctgctgcccttcggcacacagcttgcacggatttccgaaaagcttctgccggacaagccacagaaaacaacggatgatgagcgctggtttgaggatttgctggcctctgaacatgtacttggcgtatctgtcatagcaaggaagcagctgaatgaggacatcggtcagatgcttgctctggctgccgccaatgttgaaaccagttttctggcgttcgtgcatagggatgaggacgaattggagcagattcaaaaacgcgaggaagagattgacctttacaatgcccggctgtccaggaggatttccagggtacttgccgtggaaaattccccgtccgaggtaaatgcgcttaaccgcatgttctccatcatcggaaatgtggaacgcattggagaccacgcaacaaatatcgcgggctatgcccggaccatgatggagcgcaggctggagctttcttcccaggcatctgctgagctggccgatatgaggacctcatgcatgggcgccgtacgcctgatttgcagcgcctgcatcgctgagtccaaaccccggccagagcaggactcccttccggaacaggctctgcttctggaacaggacattgacaggcggacagcccggtaccgttccaaccagattgagcgcatgagaaaggggaaatgtcatgtggaaacttccatcctgtattcggaaatcctgaccgattatgagcgcatcggcgaccatgcgttcaacattgcccaggcgcttgacaagctggatgaaaattaacatgtggattctcctcctcacggcagtcccccagcttcaggcatcaatacctgcttcttcccggaaccttatcgcctttatttcaaccgtaaaagaaaaccgggtaaacactcccggtctttccattgacaaatcatataaggctctatatacttaaatcaatcattgtcacgaagaccatgtccttctccaagagaagtctgtttacgatttgaaatgaacgcagcaacattaaaataaaatggataaaacgccacgaagcaccggactgttgaaacagtctgcttcttccggcgttttttatgttcctggaggttattatgattaaacgtacgccgctgttggcagataagggcatctggaggcagattccatgacactgaaagaaatcgctgccgaagccggagtttccgtatccacggtctcccgcgtaatcaataaaagcggaaagtcccccgcaggcaaggaagtccggaaaagaatactggaaatcgcgcagaggaccggctatacccccaatgctcatgcgcggaatttaaaaatgcattccgtccgcgagaacggtaatgcctgccgctccatcgcatgcctgttcgcccaggctgccgacattggcagcgagctggcgcgcgccgtcctggtgaaaggcatggaggaggaagcacgcatacatgattacagcttgaaatacagcctgtcttcccttgacggcttccttcccccggcttttgacatgatggcaaattccagcgtggacggaatcgccataatcggcagcagccttgcggacacggattccaccgggcaatacctttgccatctttcccaacggactccccggcatatcatctacacgggctttgaatatctggacgccggcctggaccagattgtctgtgacggacaacgggctgcctccgatgcagcagaccgcctgatcctgtcaggccacaggcaaattgcctatataggcggccgcggatatagcgtccctttcctggggtactgcgcgtccctgaaggagcatggcattccctgccgtgaatcctgtgtaaagcttgtccccatttccatggaaggcgggtatctgggggcaggcgaacttctgaaatccggattaagccccacggcatgtttatgctccaatgatgttatcgcaatcggagccatgcgcgcaatcagggaattcgggctgactgtccccggagatatatccattatcagcatggacgatatcaatgtggggcaatacttagacccgacgctgactaccattcatcttcccctggctgaaatgggacggatgaccgcaaaaatcctgatcgacaggattgaaggaggacatcatcttcctatgaaaatcgtacttccataccatatggtggaacgcgagagctgcctcagctccgatgcccccgattaataaccgttttcggatttttagcggattttcccgttaagtgggagtcaacaaccggctgccctgaattatttttacacggttccggacggggcggctcccgtgcagacttaccggaataaactgtacggaaaacaggaaacagaaccgcatccgtatagataaaaaatatagttatcttttcactatagaaaaaataaatgcaggccctgtaaaggggcaaaagcgtttgcatacacttccaaacctgctataattagagacatgtgatgataatttcaaagcacacttccgggaataggaagaatcagatacatatttaaggaggatacgaatcatgaaattagatgaacgcggaaagcagtgcccaagacctgtcattgacactaagaaggcattggaatcctgcaatccgggagagacggttgaggtattggtagacaacgagattgcagtccagaacctgagcaagatggctgccagcaaaggcctttcggctgtttccgagaaaataagcgataatgaattttccgtaaaaatcgcagttggccagggagtaacccctgtctccggtgcggcggatgattcaggtgaggaaccagtggcctgccagccggacagccgcaaaaagggcatgacagtggttctgtcctccaaccttatgggtcacggcgaccctgaacttggaaaggctctgatgaaggggtttgtctacgcgcttacccagcaggacgctctgccggaaacgattcttctgtataacagcggcgcctatctttcctgcgaaggttccgacaacctggaggatttgaaatccctggaatcccagggagtggagattctcacctgcggaacctgcctgaatttctatggattaagcgaaaagcttcaggttggcagcgtcaccaacatgtatgagattgtggaacgcatgacggccgccaaacttttggtgcgtccttaagcttcctgacggccagactggcaaaatgattataataatcggataggggagattttaacctccccttccacaccacgtagcgtaccgttcggtactacgcggttcaatagtttactcggactttcagatagtgggcagtcatatcgggataaccaagtctgtccactatgattcttttggtgagtgccgagttgagcattcccgccgctctccacactccctttcggcagttcgccatctcatgcaccttccactctggtaaatgtaacgcccgcaacattttatatcttgtgcgtaccttcttccattgtttccagtacaccgctcggattctgtggcgcagccactcatccgtctgttccatcaggcttttcatgtctgcatatcgataatagttaatccatccccttgcatagcttcggagtttttcttccctctcctgattgctccatttgttccctctggttgtcagctcccgtatccggttcttcatttttgccaccgacttcgggtgtatcctcatgcggcatttccctttatgccggtaaaagccgtagcccaggtattttatcttgctgacgtggctctctgtcgttttctgaagattgactttcagaaacacttttcctgtgatgaatggcacaatgttttccatcgtcctctctgcgcttttcctgcttttgcacagaatcaggcagtcatccgcatacctcacatacttgtgtcccctgcgctccagttccttgtccaactcattcagcatgacatttccacataagggacttagcgggcctccctgcggcacgccctcggtcgttgcgtgaaatcctccgtcctccattactccggctttcaggtacttgtgtatcagcgagattaccctcccgtccttcaccgtcctcgacagcacctctatcagcttgctgtggttcaccgtgtcaaagtaggattgtaaatccatgctgaccacgcagacatatccttcgttgatatatttcctgcatctttccagtgcgtcatgcgcccctctgccgggactcctgatctgcggcaagtgcggccgccgcatgactgtccgttataccgggaatggcggcatacgccccctgtacgaatgcgtcggccgctggaaacacggcaacaaggccacctgttcctccgtccctgccgttcccctcgaccaggctgtatccgataagatcctctccattatgaagccttcggaactggaaatctccctgaaggtgatgcacagtatcaatgacacggacaggatgtcggataagcaatggctccttgcagtcgaacgggcacattacgaagcagaccgtgcagaaaggcagttcatgcttgcagatccggaaaaccggctcgttgtccgttccctggaagcgaattgggaccagaagctcaaggatctggaaaaagcaaagcaggattacgctgcataccgttcaaaaaaaacctgggtcccttccgaagaagaggaaaaggacatcctggaccttgcccgcaggatccctgagatctggaacgcaccctcttcaacaccagtggagaagaagcgcattatacgtgtcctgattgaagatatcaccgtcctgtcagaaaaaagatgtcctgatttttcaataggcatccgtttccgcagcggcagagtcgaacacttatccttaaaaaagcccctcccctgcgcggaccgcaggcggcacacggatgataccatcaccatcatccgtgatctcgcttcatccatggatgattacgagatcgccgactgtctgaaccaggacggcctgaccaccccggaaggaaaaaacttcacttatgccggtgtcagacggatccgttacaagcatgctatttccggcccttaccagagaaaccgtcaaggcatctctgttgctgaagccgccagcctgctgggcatatccaccggaaagatctattatggcatctctgcgggaaagatccccgccaaaaagcagcatcccgggtggccttgggaggtattgatcgatgataccaatctggaatcaataaaagctctttatacataggttttctttaccctgaaaccagctgccttccgtatagctggaggcagcattccaaaacatcgttgggaggtgtgcagtatgaagtcaccgtgggtatccccagtttccttgtttttcctttctcctctttgggtatttctacccttcggactgggtttggcttgtatttgccttccctcacctgctcgaccaattcggactggtgttctctcaggtagggtagaagttcatccacctgcattccgtcaatcccaccaacgcctttgttcgttttgaccttcttataggcggcatttagattgtcgcttctaagaatcgtatctagcaggttgtccgtccgaaagtccgtgttggtgtcggggttcccggtaatcctttcatgggcgtactctcctgtttcccttccctgttccgcaggtatctctcgcaggtagtcctcaatatgaagttgtctgtacttaattccatgtccggtttccatttggtaacgacacctcctactgttcagtccttcccggtgcgtttgcgaccgcccggtactatgacctctgctgacttctcacggcaggctttactccgtgacagcgaatgttttatcgccactttcacgtccgtgagacctccccgggtactcacacgttctttcccacttatacctgccccgtttactgctggcgttccgtgcagttattggactttagtttgttaggcaacctcatccacgcttcacagcctatccggacaacttttacaggccagtggtttgcctccggcttccttcagaccccacctcacgatgacgcccttgccattggctgcacccttcccactgccgggcgggtcagggactttcacccgttagaacgtgcgcccgccgggcgcacccacaaaggaccctttcattttaagggtccttttaacttgcagacaagtataagttggctgaaagagcaggcgaagccttcaaagacggctcgcggcttaaaaagtaatattgactattaaattaattttgtctgaagacaccggtcctgattccgggcacgctcagccatgtctcataaatattgtccttaaacgcctccggctctctgatgaccggcagattgcaggtacacctttcccctttctttccggctgccgctccatcccgcatcccatcaccatccattcccagataccctgtctccaggtcctgctccgacacccgcaggcattttacatcatcctcaaacagttccggatgcatgagataagccgcggccgtcacatcccagttataaaatccgggaatgccgtaatcctcatcattatacccgaaccaataatctgttttttccatgatatatgctgccgccctgttttcttttcctgagaaccgttccctgtattcctgctttgtaaataaaaccttaaggcagttgttgcctgtcattatggaaacattccgtccctttgtgagaacggtcctggttgccggcgggtcacaggaaaaattcagctcattcattaccttcttatcaaatacaaggggactagtgattccgcccatcaggacaatctcttttaccttttcaaagaaatacctgtccctctcataggcgcctctcaggtttgtcagggaacccgtggcaagaatcgacagctcccccggatggcggtccgccatttccgccagaaaaccggcagcctcgctctggtaacagcctctcttctccccgcctctttttacgggaatgtccctgcgtcccaattcttccagcatccgcagattcacttcctgcaccacatccaggctgctgttgccgtaggtggaagtgacccccagaaattcggcttccctgcttcccagcaaatacatcagggccagcccgtcatccacatcgcaattctttattccaaaggtattgtcacagtcaaatacaattttcttcatctatatttcctcctggcacattcctctcatgccataccatgcccaaacagcacggctccttctgtttccacggccagtccggccttcatgcctgcccggaatcgtccgggacggccgggaccttccatcctctggcacagaatgcttccgccgggagagattttctccggcactcttacccttatctctgtcatctcccccatgaatgtgacctcctccaccgcataatctcctttctcctgaagacgcactgagtatggacgtatcatggcgtcataggctccatccggcaattccgtccttttctcaaacagaggactgacaaatctgcctcctgtcacctccccggaaatataatttacctttccaaagtactctgccaccttttttgtttttggatggcagaacatctgctccggagtaccgtactgaagaatctgcccatcctccatcagcgcaattcggtcggacatgcgaagagcctccgccttgtcgtgggtgacaagaatggttgtaattttccacgcctcatggagttttcttaccagccgcgccatctccgtccgcagcccctcatccaggccggaaaacggttcgtccagaagcagtaccctgggttctgccgccaaagccctggccagggccactctctgcatctggccccctgacatctccctcattcttctcttcccgaatccgggaagctgcactgcccgcagcagttcctccacccgctccttccgctcctttttcggcacctttttaagttccattggaaaggcgatatttttctccgccgtcatatggggaaacagccgcaaatcctggaacacgattaccgttcccctattctttggctgccggtccatcactgatgctccctgtatccgtatatccccgctctcctgctccaaaagacctgctatacattttaacagagtggtctttccgcagccggattttcctaagagggatacaaactctccctcctgtatttccaggctgattccgtgcagtatctcctttttctgaagcgataccttcagatcttctatgttaagactcataatatcctcccgccatctgtccggtccaataccccgcgatccgttcaaacacagcaaataccagcagggtgatgcccatgaacagaatgctgtatacgcaagcaatattccggctgccgctctgtaaatagggtaccatcacaaccgcaaatgtctttatcctgccgcctccaagaagcagcgtcagaaaatactggctaaaggatacaatgtatgacatgctgactgccgacagtatcaccgggaccagcattggcagtgtggtccttctgaatgcctgaaagggaccggcccccagcacccgggcctgctcctccagcgcaatacccactgcccgggtgccgtccatgataaggcgcaccgcgtagggcagggaataaatcaggtgtgccaggatgacccctgccactgtattgttaagtcccatgcggataaatgtaatctgtatccccatggcaaacacagtcgcaggtaccatgaggggaaggaccgtaagaaaggacatcaaatcctttccccggaaccggtacaggataagggccctggatgtcagtaccccgattgcggccgacaagacggctaccacggaagaaatcataatgctggatgccatgagggagaacagttctccttttcttctgacaatttccatgactgcccggtccgagagcacctggggaaacaggccgggccaggcccatcgttccgtaaatacccatacaaccagactggccgcggggatcagaatggatgcacaaagtacggccagaattatatttgtgataaacgattttctcttcttcatctcctgccgctccatcttctactgctccgtcagcgccttcatatttttttgcacaataaaataataaatccaggcgctgagtacggagagaatgataatgattccatttaacgccatggaatagggccggtttctcaaatccggatggatatactgctggtatgccagcaccggaagggcctttggcgaggtggcgcccaggagaaagggcagctcataggcgcccagggcaaatacaaatataatcaggaacccgctgattaccgcgcctttacaaagaggcagggtgattttacaaaaggcagtccaccggcccgcccccaggtttatggctgcctcccccaggttctcattgatatttgccatcagcgcaatgacaaaataaaggatgaagggaatctccttccacaaatatgccaggatgactcccaccccctttgtatcgtaaatgagcatgggaaactgctgttgttcctgtaacattccaagggcataaccaattctggccagcacaccattctgagaaaagatgttgaccacaaaaatggccaccactacatgggggacaatgatgggaagctgtatcacccgcatcatgggtccctttgtctttttgtgcgccacacacacagcgcttaaacccacgcccgccacagtggcaatccccgcggacaggaatgccaccttcaggctgtacagcacagatttaagcatctccggcctggtcagcacttccctgtaatatttaaacgttggctcccttaacccaaaagctggaattaccccaagactctgggtaattccagttaccaatcctatgataaacaacagggataatatgatttggggagccagaagcaaatacggagtcagctttcttctcattccttttcctctcattccttcccgttatttacccactacctcctctgtccagatttcctcaatgatgggaaccagctgcgcgggcatctcaggaaggcgtttggagagaagttcatcctggggtattgtccccttgcccaggtccacccggtcaaaggcggctttctgctcaccggacagcttctcgttgtccagaaccggaatgaccctcaacttctcatagcggtctgcctggatttccggcgacatcatctcgttgattgccaccatggccccggccttattgcctgagttagccgcaattgccataaagttggtattgccgatggttcccttgtcaaactggaaggctgccgtggtatctgtgtatttgccgtcctcaatgctcagagccacgtcataagctccgtatgtcatgttcatcactagttccccgtccgcaaacatgttgtccacggtagtggaggaatccgggaaggcagctccctggttccaaagatatggattcagctctctcaggtactccatggccggcgccactgccgccctgacggtttccttgtcctcctccatatccataaactgctcgtagccgcagatttcatagataatatttctcacaaacgcgctgcctgtgaaatcaggaagcgcgggatacgtcaccttacccggatatttctccacgaattccctcagcgctccggcgctctccggcacatccggcgtcactgccaggtccgccaccatgaccagctgggcctttccgtaaggcgcctcatacccttcaatcggataagcaaagtccatggtcacatcctcgctgtccccatccacatagtcattaaaattgggaagcttatctgtaaaggggccgtacagcatgttgttttcctttgctgaccggaagttctccccgttaatccaaatcatatcaatgcttccgtccttcccgcccgcctgtatctccccggtgagctggcttaaaacctggtcgatatccatgggcacacgctccattgtgatatcgtatttttccttcatgacccgcgcaaattcatcgtccagccaccggttcagtttttcatccccgccccagccgtagaaggtaaccgttgttccctttgctgcctccttcatctgttcaaaggtcatgttctccatgccgggctggctgcttcccgtatccccggcctggctgccgcctgtgtcctgtgtccgtccgcttcccgaacacgctcccagagacagcatcattgcggcggccaataccgctgctgtgattcttctcctcatgctttctcctcctgctgtttttctaaaaataataaccctgcctgataattttatgatttcccctgccgtaatcttatgcagtgcggtcaggggaaatcacatcaccggaagggttatcctattctgttacaaatgcagcctggatatccttatccttcgcgccgttttcaatgataaacagattgtcaacatcgaatccggcatccttcatgacggaaatacctgtttttgcgcacttgtttccgctgtagcaaagcaggtatacgggtttggacgggtccatttcctcttttgccatcttgtacatggcagtctgcgctgccgggtcttcgatttcctttaaggggctctggagggatccctttaaatggccctctgcatatgtatcattgtcgcggacatccaggatttggacatcgcttcctcccactgcctttaaggcatctgccgccgtgactgttttccagtcgatatcctcgtcagcgcggttggtggtaagggcgcctttctcagactccagggctttggctccgccctccacggtataaatcagggaaccgtcgatgccggcctccttaagaacaccggttgccttctcagcgcctctcttgccgctgttgcagatgatatagattttctgtccgtcgcttaagttttcctttgcatatgtattcatggcatctgccagggaatcatcctccaacgggaaaatagggcaccaatcggaatcagccacccttcccttcacataattatcccattcccttacatccagcacatgggcgctcttatcttttgccgccgccacagcgtctcccggagatacatactgatagctgtcatcagactgcgctgccgctgcctgagctgttgtttcaactcctgctttctggccgcatccggccactgctgtcatggacagcgccatcatgatccctaatgtaacgattttctttttcatttcttcctccttgttttatcttgtttttctatatatattttccttaccatggcaacaaaggcagataaggcaaataatatcagtaagccggtgacaaagaacctggcgccgccggtcagcattcctcccacataggagtatacaatggtcgccggaagctgtccgattcccgtggctatgaaaaatgacagaaagggcatggatgtaagccccgccccatagctcacaatgtcaaaggacacaaaaggcagaagcctgcaaatcaatattgtatttttgccgtatttatcaaaaaaagtgtctatctgtttaagccccgccttgctggtcagcttttccgccgcatcccttcccagtatccttgctatgtaaaaacaaagggcggcgcctgccatggcactggaccaggacaggattgctccctgccaccatccaaagagattcgcgttggcaaaggtgatgaggaaggccggaagaggcgccatgacagactgcagcaccatcagtccgaaggataccgcagcagcatagtttccgtaggaagccacaaattccctgaccaccccaaagtctccggtggcaaacatggtaacgattttattcatcatatcctttacagacggtatgcacatatagctcagtatggacgcggctatgcatgcagccaccacggttttccatatccatttactctgttttttctccattcagactcctttcctacagcctgtccatcttttctaaaaattccatgtccagatactgccccagcttttgaaacgtggactgattaaacagcagcttgtccggctgctggtactgcacccaggccatggcgcaccatgtaattccccgcaggcaggtgatgggtatataggcaagagtcctctccatcagcccccttgtgtcaaatctgccgtccaccttttgtatatacagatttatgaagttctccatctcctccgggctcagaatcacatctgttttccaaaatgtggtggttggcgcaaggaaatgtcccaaatcctgggccggttccccccggacaggcttctcccagtccaccaggtagtttccctttccctctccgttgatgaggaaattagtggaattgagctccgtattgacgcagcattcatagcctttgcagactgctgcctccctgcagcgtctccagccccggtccagcatctgtcttattttcattttgagcttccggtcccccaggtctgaatccatgtatgtcctgaccatttcctcgcattctgtcaggattgcctccagggggttctccggcctaaccagatggctgccgcttcccaccttgacactgtggatgtccgccaggcactccgctccaaaggacagctcagtcctgtaatccatggggtgtcccggcaggaattccatcaccatgatgccatgaggaattttcaccaaactcccgtccacataaaaaggccgcggtgtcctgcccgaatgcaggagcagctttaacgtatcgtattcgtactgtatctgatgttccaaatgcatctggctgccgcagtttacgcggagcaccagctttctgccggtgacaggatgggtaaacaggtaattcctgttgtactccccctgggccagcatacggtattcctccgtcacctggtcaggcagtcccagcgcgctgcggtactgcttccaggccacatattcccttaatccggctatccgttccattttatgtcacctcacatcccggtacatccggtcaatcagtccaatgggcacccgatcccggtacatcttacgcagccggttcattttccacatcagcttaagcttgggcagggttcctttggggaaacgcctgtccgaagtatagatgcggcgtccggtcatgcccagctttactccccgctccttaagcgtcagagaaaactggtaatcctccatcacaggaatctccggaaacatgcccgcgtcgaaaaacaggctgcggtccacaaagatgccctgatccccaaacatgaccttgcggtccttaatccggtggtttgatatcacgcggcaggtaaacatgaagaagttgcgcgaatgaaaggcaatcccgaaacatcccgcgctgtggtccttcatcactctgcgtatttcagccaggggacggggcggcagttcactgtcgcagtggagaaaaaacagaatatccccatggctcttcctggcgcccgtattcatctgcttcgcccgtcccttttctgagtgtatgactttaacccaggggcgaatccgttccatggtcctgtccgtgctgccgccgtctacaaacagtatttcacatgttcctctcaacggttccagctggtcctgcatctgacagatggtcttctcctcattgtagacaggtacaatgatggaaatacggctggtttttgccagataccgtcctgtggacgtattttgcagcctcttatcctcccgcattctccggcggtatccctgaagatcctggtaaacgtccatgtcccacattgcttcggtaaatcccaccgtgcacccttccgtcttaatccggcgcacagtgtcccaaagcacggagccctgtccatatccttccacctcaaacacggcccgccgcggtttcttcatgcccaccagataatatcccccgtccctggtaggccccagtaccacatccttttgttcaagcagaccaaatgcccgttccagatactccgcccgcacttcgggtacatcagttcccatgagtatacatgcgtcataaccccggcccaatacctcccggatggcctgatacatccgttcccccaggccgctgcctctctgggaaatgtaatattcccctctgccaaaaaccggatgtaaaagttctctgccctcgtccggtgtaaagcatacaaaaagctgcccctccaccttcccgcattccctctttatatcttccagaaaacaggtgtggagacgggcgcagcccttagcactgagcgcgggcatcatcctggtttttgtctgtccgggttcaggaacccttgtgaaaataataatcgcgcgtttcatctttcagattctctccatcttccgtcttgccaaaccatcaccaaaattttgtaagcatcctgttaaccattgatttcccgatatccggcttctcatcacatcccagaatctcaggcagcaggtgtgtgactccctggcagccgccccgggtaaggtttccggcgcaggacgcacagtaggtaaatacagtcccattcccctggtccctggtctggtgcgccatctcacgggccagttccggctcctttcctcccgcgcaccctcccagaccgcagcactggacgccctgcacagtctcaggcatgttctttagaaatggagccagccactgcacccactgttttctctccctgtcagggcatggaaggaacagcgccccgttcccttccagctggaggcccattcccagccgggctaatttctcataaatgctgataacctttacctccagcttatccttcaggaactcataacagttgggacagagcatcacggcctcctcagcccctgccctgcgaagattttcatttatcctccctgcgatttcctcctcatcccttttaagtccaagctctgccaccggtttgccgcagcagtcaaacaggactcccatatcttccttttcctccagcagactgattagtttcctggtggtctttggataaaaggaaggaaaattgcaccccggaaacagaatgctcctgcctgccagccgccgtttattgcggtaaatataattccgcttttccgccagaaccaaggcgtaccctttttccggacattttccctgattttcctccaccctttcccggcgcatatccaggatgaccgccctgccgtcaattcccagcgggcagacctgggtacaggttccgcacaggaaacagtgataagctaactccttgagctctgccgtgtcaccgatatcaaggccgtacttacttaaaaaagagcagttttcccggcatatgcggcaatgtacgcatttatcgctgtcttttatcctgaatttcccgttcatcctcttccaacctttcctctgtctcccgcagtacatacctttttttaaaaaacatacccaggccaatgacaactgccgccagcacggccgtgatggagaaatagagaacccggttctccctgtcagccaggcccgcggttcccactgtatacatggctgttccgggcagcatgaatacgaaggaatatatggaataagtcccaaaggggatgtccgtaactccataagcaaaattctgcaggttatagggaaacaggggaaccagccttgtaatcatcagcacaaacagttcatttttccccgactcgtcaaacagccattttttcaggtatttattcttcataaccacaggcttgatactgtccttcaggaaaaaacggcctgccagaaaggctgccatggctcccagagtagctgccaccgtacagcataaggtccccagtaccggaccgaacagcaggcctgccaggaaggcaaatgtaactcccggcagcgtgagcaccacacagccaatcaccgtgactgccgtgtatgcgaaaaccgcagccgccatatgctcctgtgccattcttcccagaaactccagcgtgtctctgccccctacccgggctgaccagccgaatacatggttgcagaccaataccgccaggatgattacggtgaataataccggctttttaatattctttttattatgctttccgctttccttcatcctctgttccttaccctgcgtttcatcccattccctgccggccatgcctgcacaccaacattccaatccacgtcttcacaacctgaatcagggacacgccccccagtatcgcactgatgaaatagtaagcccgaacctcatccgctgaattcatccatgtatatcccccataagcagatgtcagcgctatcatacctgcattcataagccacactgtttttgtcaggttccttctctgtctcaggaaatagagaagaagcatcacggtcaggaccgccatcagaagcacagccccatttgccagcaattccatgggatatctggcttcccagctccggtttttatacaccacgtaccgtgccatccccattttcctgcgggtaaaatactgaatggcccatgcccctgccaggcacaggatttccagtattgtcacagatatatatgcagctttcttcataaccattttcccttttacatttaataagcgttggacttaatcaagacgcaacgcttatcttcaccaatctttatttttttgctttgtccgtggacaactcacccaccgtggtaaaccggcagtcgctatttgccgggtctcccacctgcaccggaagtgaatcatccatctgccactggtaccagcctccgtcatacaaggtcatattggtcattccgttttcatagcaaatcaggaacgggatcgtagctctccagcctgtgccgcagtaaaaggaaagctcattgtcaagagaagcaccggattcctccagatagccctttaatacatccaggccggctgtggttccgttctcattaagataggaaccgtcatccgtatcatgtccccagacagcgccctcaggttcgcctgccctgtcaatgtatccatatccgcttgtcttgcccaggaattcgtccctgctgcggatgctgaccagcttaaagttatcgtcatctgccagcttttcctttacctggtcaatggacaggatgtattcaggatgggccgggatttccacgccgaactccttgtcagcggcctgcggggtattgatagttttctcagtctcgtagccgctctcaagccaggcttcaaaaccgccgtccagacattttacattctccacaccggcccataaaagggtgaatgccacgcggtcgtccgcagaattcgtgcccttatcactgtagcagataaccgttgtatcttttgtgattccgtattcagccatcagagcctttatctcttccggagtccggatattccagtattcctctgattcaatatcatctgtattcatatgataggctcctacgatatggccgtccttataagacgccgcatcctggacagtaccccatgcacattccagaaccatataatcctttgactcctcctgattcccgtccagaacgctctgaacccagtccggtgacacatagacctttttcttctcaaccgggtccgcctttacagcagatgaattccctgtctcttcacctgtttctaactttgccgcggctgtgtcctttgtcgtatccgcgcttgtatccgctgccatcccagctgacgcgctgctgtttgacccggctgccgtcattgaagcatctgtattggaagaacaccctgctgccagtaatgcagcagtgcataaaacaatgcctaaaaatcttctcttcataattattttccactcccggtttcgtattgtctcagtataaataatataatgttactttgattattataaaaacacctgcttgttttgtccaatcgacgtaatatatatgttttgtgttatatatagtttttttttataatataaatctctaaaaagtccctgacttcccggaccacgaaaaatcctcccggttttgacatctatctcttatccgcctttaaatcagtctgggcaggattgtcaatcaaactgccatcttcagaaaaccgagagccatggcatggacagtcccagctgtgttcctcctggttccaggacagcctgcagcccatatgcggacatctgggtgtcccgaaggcggtaagaccgcgtaaagcatggtatccttcctttaaaaaggagcccgcagatgccttccatgtccatctctgaggagaaaaaacctgttcccacgggctctctatgcccatgaccagattccttaaaatcagtgccgagaccatggaaccggtcattccccatttctggaaaccggatgctatataccagtacggccgcagacgggaatattttccgatatagggaacagcatccagcgtcatacagtcctgtgccgcccactctgaaacaatcctcaaatccggccacagggttctggcctgacctctcaggtattcaaaggaaaagccgtcacacccttctcctgtgcggtgtcctccgcctcccatcagaatatagggacctgcctttcgaaaggacagtccatcctcatcaacgccataatacatgccgtccagattaacctgcttcccgcctccggcctccagcgccagcacatagctgcgttcctgatgcatcctggcaaaataaaatccaggcacattctgaaacggataatggcaggcaaaaataattttctctgcctccatgattccccggtccgtaatcagacgatgcccctccaccttttgcaccgcagtgtgttcaaagacagggattccctccctgacagcctcaagaaatttaagcggatgaaactgcgcctgattttcaaataaaagcgcctctgttaccggaaagggcagactggtgtcagatgtcaggacagccggaagtccaaggcttacagctgccctgtactccttttccagatgtatccttccgctttcctcctttgaatagagacaggcgggaaggcggacaaagccgcagtcaatgttccgggcccgaatcatcctctcatattcctcaacggcgctttggttagcccttgcatacagaaaagccctgtcatgtcccattgtcctgaccaatttgtcatagataagtccgtgctgggatgtgatttttgccgtggtattctttgtctgaccgtggcccgccaccctggcctccagaaccgccacatctgcgccctggtccgcaagcatgcgggcgcatagcattcccgccattcccgcgcctatcacagccacctctgccctgggtggaaggtctgtcctgcttttgcggcccgtgtccgagggacctgactgtgccggatgttccgtattctcacgtatatcttttaaccatatagattccatttcatgacctcccagcaatgcgtactaatggttattgttccccggaaaagacaaaatatgaaaggtattattttgaaacattctgtttataatgaaacacgcgcttggcccggctctctcaacccggctctcatcgacccacgcaaaaaggcggacccggccaatgcgccggtacccgccctcctgttttatctgttgcagggacgccagttccgtctcccgtcttcaaatcccactctgtatccgtcgttaaagccggcgcggtaagcccaccgtctctcacctgcacacgggtcccataccggccaccagtcgttgtcccagtcattctgattggagccacaccctctgcagcatctacagcacctgcagcatctgcagcagcatctattacaacacatatcaaatcctcctttcaaatatgattatggtatattgtatgggacagatggacaatgtgtgactcttctcaatggcttttcctttttgtctctgccagccgtggtgaaagcttccagattgagtaatgtgagcacaagagcaacgtcaatcaggtgcatcccactccggtttcatatccttaccgctcactcccccggcccacagacccaaacagtctcatcttctccatcacagactgtttcacagcctctatctctggcaggatgatatccgtaagccccattccttccctgcggccaagggccgctgccctggcaccggcctggttgatatccgtgaaaatattgaccttgctgattccccgctccaccgctgtcctgaaatcagaatccgacagaccggagcccccgtgaaggaccagtcctttttacatgctcgatattagcctcgtattccatggtggaacagtcatacataatggagctgaatcccaggtccagggcttgtctgcatgtctcctccttcaggccgtggtccagatgcaccaccacagggaccgacgctctctccgccatgggaatcagaagatttgccaggtcctcaatcggcccatagggcagcagtacctcggctgttccgatgataacaggggagtccagttcctcggcagcctccatcacgcctctggccagttccaggttgaccgtgttaaacagtcccaccgcgtactttcccctcctggcgggaatcaatacgtcatttaagtttaccagcatttttcttacctgtccttcttactttgtctttaatgcatcgtcaaaggcaatatctgacggtaaaaagttaatcttcttcgtaaatgcacatgcctctgttcccccgaaaatacggtccatgccgctgtcctcccattcaacggaaagaggcccgtcatatccctttacattcagtatccggatgattttgtcaaaatccacgtcaccatggcccggcgatacaaagttccagccccgtcttgggtcaccgaaggtgatgtgagagcccaggattccatttcttccgttcaggtttacggccgcgtccttgatatgtacgtgatacaccctgtcggcaaaatcatacaggaacatggccgggtccattccctgccaaatcaggtggctggggtcaaaattaatgcccagagtctcacggtattcaaacacctccagcagtttccgggtgctgtaatagtcaaatgcgatttccgttggatggacttccagggcaaactttacgccgcatcccctgcacctgtaccggacaccactgcatccggttcaaagcttggctcaaagccctccttatccttccaggattccatggaaagattcagtttcctgcacaggtcctctatccgttttccggaggccgtgcggtaatagatgcccggagcgccgcatttaatcaatacacccccggcccccatatccaggaccgtctgccccaggggcttcacatcccggacccggattacctctgtgatatccctgccctccgcccgtttgctccattcctggtaacgttcccggtccagcataaagcacagctcctctgcgcttggcacaaagaaatccacatagggcagcaccttttccaaaatccctttccagtcctccctggctgcttccgaggacgggtcaatggctgccatatccagggatatggcggttcccccctcttttatccgcctgaacatccgtgccagctcttctccctgattctggtacatgcggcgcatcagggttggatatccgaaatggaacaggtgcgcccctttgattgcctcaaagtccctgttcttcacacatttcttctggaactcatagtcaaaccggtccgccttttcctccaatgccttgaatatattcaggctgttctccagatgcttatagctgtcctcatccctggtggtcctcatggcctttacatccaggcccacgtattctccgttctcaccgtatccgttttccttcagcaccttgacctggttaaaggcagaccgcaggttttccacgccaaaggccttgtcctggtcatacttgattccgttctggtcgttgaggtgcacggtcatcagtttccccattgccatggcaaatccgatttcatgggcagggtcaagaccggccaggatggcgtgggcgctctccaggtttccgcccacccgcttggggtcaatggtggctgccgacacagccagcacatggcccatggtcccgcagatgcttctgtcaatgggctcgtttggctttggctcaatgcatatcctgatatccgaatcatattccagcattttgttgatggcatgaatcagcatctttgtggcccacaccggggatttggactccgcacagagggttccctcccttgccagccacagcaccaccatattgcagcccagctcctttgcaatgtcaatggagcggtaagccctccacatggcgtattccctgtcctcctgtgaggtgctcatgaatccgccgtccgcggtgcgtccgtccatccagagcctgggcgccacaaactcagccgccagcccgtatttgtccagcatccttttaagttccctggccttttcctttatctcttcctctgtgtaatcattgatattcggcactgcgtcgtcatcatggaactggatggcggaaaaacccagctccgcgaatttcctgattttctcctcaaaatcaatttcatttctggtagccggcccataggaatccactcctgaatgcacattccatggccccacggaaaacttgaattttgtcatatccttcccctcctgcttcattggttgtctgtatctcatactcatactatagcaggtttacggcctggaatcccaaacaaatttacggttcaaaccatgacaagtttgctttttgctttacaagtacggccaggaggacgtatactgtcagaaaggaggggaattcgatgaaccaggaatttgaaattatatcgcacagccaaatgaactttaaactgtttctcgtcaacatgctttaccgcacgccccatatccacaaggattttgagctctgccttctgctggagggcagtctgagccttcaggcccaaaatgagaatcacagcctgaagccaaatttgattaaaatgcgcagggcttttaaacctgctctttgccggccttctggacaccctgcccagcaggcttttgtctgataaggaaaaaaacgcctcccagagcaaggcttcccgcatgcgcaaaatcatccactatattgacgaacattattcggaaaagcttctcctgtccgacattgccctgaaggaggatttaagtcttacctacctttcccatttttttaaagattacctgggaatcccctttcaggaatacctggccaaaatccgatgcgaaaaagcccgccagcttttactgctgacggacttcccattgctggacatctgcatgtcctgcggtttttctgattccaaatattttaacagcggcttcaggcggcagtatggctgttcccccaaggagtaccgcctaaatttccgccatgaccagctgaagcagcagcaaaagtccatgctcaccacccaggaatttttgtccgccgcctccagcatcgtgattttagagcgctgccttcttccatttcagtaataaatctgagcagcaattcaaacacgctctatttttcaaagtagcgatagagtacttttgtaaagggaggtatatttgcactcatatttcggatagagttatcctcctcatatttcatttctttttcccggcagcttttggcatactccataagctgaataaagtccgttttaacgcctgttctgtatgtgaataattccgccatcaactccattgcctccctgttgtttaacaatgcaaacgaagtaaaaatacagaatcccagattttccagaacaaatatctggtcgtacaggtactctatatccggtaccgaccggtagcgttcatctatcctttccaggcggatgtcaaaccgcatttcatcatcaattgccttccggtccaacaggggaaccaggtcctctctgtccgggtacaatcttaagatgccttctgttctggatgctacaagccttccggtcagtgttccctggtcaatctcctccaacaagccaagaatactctctctgtcctgccttttcccctctgcgctgaggtacatcttagcggcagtgacaaactctgtccctgttatgccaaggtccatggctcttttctgtacctgttttgtaaatgccatatcatcaatattaaagcctctttttaaagccgccatgacctcgctctggtcaggagaaatatatgcctctccatcattggacatatgccggtttaaacaccccaccacgcacataggcgcgcagcagtagttagtctttctggcttccctccgcccctctttctgcttctctgccgctgatatccttacggaaggctcccgcgtcctgttgtaaagcttctgactgtccctttccaggaaatctgtcctcttttctctatcctttaggagttccagcaaagtgatggagccataggccggaagggcctgaccgcacacctcgctttccaggatgatacgggccagcctttttccggttttaaaaaagttatccctatcccggcactcacgcccaaaatatccgtttcctgtaaccaccactgccctgagccccttgcttcccggaatatccccaaacccgtttcggggacagtggtattgcggatccccatccgggtaggtacagaaaaaagtactcagggaaagctgcatgtccgctgccttcccgactcccagtatggctgcatccgccccgaaccgtttctttaagcgttccactatggttcctgtatctttcctctctaattccggcatgtggattatttcagccgaatcttcccctatatgcaagacagcatttttctcagtggatttcccgcaaatcaacagacctgcaattgacagggatgccatcttctgcggaaggttccctgaaacattacagacctgcaggccttctccctttcctcttttggaagcaatggtaaccctgcagcagctggcaaccttacatccggtcagtatgcccggaacaagggcaattgcattttccggcgaatagcgccctgcataatggggtacgctggaagccaccagtttcagggcaagcccccgcccataacagccccacgattttggctcatagtccaggacttctattctttcagtggtcaaatccgcttttaaaatcttctccatttcaatccctttctatatggactttaccagaacgaatttctcattatgctctaatatttctatcttatcgtataatagggacatcttcctctgcacctccccggcgctcagaagtcccggcatgaaggaatccctgactctcccatttttcagaatcagaatctcgtcacaatattccaatgcaaaattagggtcgtgcagtgtaatcaaaccgcattttccttccctgtgaataagttcccttatttttgacagaatcagatggtggttcaaaaaatccaatgcgctgtccggctcatcaaaaagcatgaccggggcattttgtaccattgccctggccaggataatcagctgtttctgtccctcgctcagcgacataaagtccgcatccgccttttcctccagccccaattcccggatgacgccccgggcctcttccttttgccctttggacggcgtggaaaaaaagttcagatatggattgaaacccatggcaaccacatcggttgtggaaatactgtagatgattgtgtttttctgagggacataactgattaactgagcttttcgcttttcattcatcttataagcatcctcgccgcagaccctccaaaccgcagaccttcccctaaggagtccgcaggatgcctttagcatggttgtcttaccggacccgttcagccctaaaagcgcagtcagttttccttctctcaagcttatgtcacaatgcttgattacttccctttttccataggaaaccgacatatccttaatctctaacagaaccgtttccattccagtccccccttttacagagaaggtataccaataagggaaccccgcatacggatgtcagtatgctgataggaacctcgcttccagccatactccttgcgaagcagtccgcagccatcatgattgacgcgcctgtcagcccgcttagtatgcatgtcccaaaatcgcttttcttaagcagcattctggcaatatgcggggccaccaacccaataaaactgatgattcctgttacacagaccgtggaagccaccagaagcgtagaaaatcccaatacaatacaccgtaccagatttaccctcatcccaagcatccgcgcctcatcatctcccagggacagcagcgtaatctgccatcttaacaaaatgattccaatgaagcccgccaggaaaacaggaaaaatcactctcagcttatccattgtgatattcgcaaagcttcccattgcccaataatcaatggcagacagctgtttgtccgggtcagcaaaatatttcatggccatgacaaatgcttctgccgcagcctttacagcaatgcctgccagcacataagttgccgatgttctctgtctcacaaatccagccaggacaaccacggcagccaccgctgttatgcctcccacaaacgaactcccagctgccagaatcatccccccatgaaggcatacaattgaaaatgcagcacccgcagcagcgccattggctacaccaatcaagtcaggtgcagccaatggatttttaaaaatattttgatatacggcccctgccatactcaggccgaatcctgccatcaatgccatgattgttctgggcagacgcagtgtgaaaaacacattgcgcgccattccctcatggacagttccggtacagatttgaaatatttcccttaaagtcagattgtattttccaacataaagagaaatcaggaatgcagctatggtaacggcagccgctcccaggtaaatgtgtgattctttctgtttcaatcgtgtatacctttactttgtaatcaatgccgtatcaatgtctgtatgataaaattctttataaaaatcagctgcttcttctgcaaatgtatcaaagggatacttatcctcattgataatactggaaagccacatgcatcccaggataccggaaggaaccggtgaatcccatgcctcgaagtcttccggcatttcatacacctgcgcgttcttgactgcattgatttcagccagctgcccatccttcatcacatcttcttttgtaaaatccgcttccgggatgattacaagaatgtcaggattgtacgcaatcaactgttcatacgatatattggcccagcctttatcggtcaaatcactggcagcatttacaccgcctgccgtttcaatcacactgttctggtacatggccggagcagccgctgtcagtacgctgctggttcctgcaatgtagaccgatggtttttccgtcttttcccctgaaattttatctaattcctccagctttgtatcataatatgaaatcagtttctctgcctgttctttggccccagctgcctgtccaatcatggaaatggtttccaaaagcaaatccgtatcctccggattcaccactaatactgcaatccccatgccggataaagtctcggcctgctcagacaaacgctttggaagtactaccaggtccggctcaagagatatgcacccctctaaattaaattccttcgcagtccccacatccggcagattcaaaagttcaggcgccgccaatccataaatgggcctggatgctgcctttgactcgataccaaccagtttatcctcaatccccaatgcaatcatcatggaggtggtgatataatacccgcttacgattttgtccgccggcttatctaataccacttcccttccaaccgcatccgtgatttttattgcccctgatgttccggcatccgcagccgaagagggctcctcttttaccgcttctacctccgctgcttctgtctgggtttgggtatccggcacagctgcctgtgattcggccttctgtccttctgtctctgactggacctggttttctcctgtctgtgaagaacagccggtcacggaagccatgacaagcgatgcgctcaataaaattgccaatatttttttcatcttcttctcccctgtctgtatcatatgtatatttaccctatacattatatcatttgagaaaattaccacaaatagcttatatttatactcttttatctgaaattgtttttatctatgcacatgactgaaatagccgtggtattcctcccgcatatcccctttatttttattggcatcgggaacaatgcgaggcaaatttcatgttgacacaggcattgtgttatgagatacttttatatatagtatttaatactacgtatggaggtgttgtatgaaaactgttattctaattgactctggctgcgacgtatcccatgagatagtccagagatttcacatgaaggtgatgccccttcatatcatttatccggaacgggattatattgacggcgtggacatccttcctgaggccatttatcagcgttttccgggcgaaattcccgccacttcaacacccagtccccaggatgtgaaagatatggttgaagaaatcaaggcagagggttatactcatgtgctggcattctgtatttccagcggcttaagcggtacatataatacggttgccagtgttctgggagatgaaaaggacctgacttcctttgtgctggacaccagaaacatatcctttggggccggtatcctggctgtatgggccgggatgcagttagaagaagggaaaagctttgatgaactgaaagaaatgcttcccggaaaagttaaggattccaaggtattctattacatggatacgctgacctatctgcgcaggggaggccgaatcggtctggtcacctctgcggcaggcagcatcctaaacattaagcccatcatctcctgcaatgatgacggggtatattacactgctgcgaaaatacgtggcgcaaagcggggactctccagactgctggcggaagccagttcctttgccggcggccgcccctgcctgaccgccctgttgaacggccagggacaggaggcgtccgatgaactgaggccccggctgattgcccgcatcccggaaggacgcctgattatggaaaaagccatcactgcttccctggccgtacacaccggccccggtctggtgggaatcggcgtgctccgtctgtagcaggtatgtacctgcaggccggcccggaaacagttggccggaaacagttggacctataaaagttacagtgcctccgccgcccttgccagttcttcccgaatggcaatatgctggggacagacctgttcacacttgccgcatttgatacattctgcggctttcttttttccatgccctccaaccagccagtcctcctgatgagcggcagccgccttatccctataaagggtcagataattcatggctgtaaatgaaccggatatgccaatgttattgggacataccttggcgcagtaattgcaggtagtgcatggaatcaggggaatccggttaatctccctgtgtgcagcatccagtgtcctctgctcctccggggtcaggccgttaaaatccttcatgctggaaagattatcctccatctgctccaggctgctcataccggagagcacagtaataacgccttccagaccggccgcaaaacggatggcccaggacgcagccgacctgtccggttctgccttcttcagaatgttcaggacagactccggcggattggccagcataccgccttttacaggctccatgattaccactggttttccgtgctttctggccacctcatagcatcgtccggactgcacggccgggtaatcccagtcagcataattgatttgaagctggacaaattccatttccggatgcctggtcaacagttcatccagctcctcaggcgttgagtggaaggaaaatcccacatgcttaatcagaccctgcgcctttttctcctgaacaaatccccacatatcatagtcatcgaaaaaatgggttcggctctctcccaggttatgcagcaggtaaaaatcaaaatatccggctcctgtctgctttaaggaagtgtcaaactgtgcagctgcttcctccctgctcctgcagttaatccatgcagcgttcttggtcgccagctggaaccggctgcggggataccgttctaccaatgcctggcggatggcatcctcgctgcctgcataggcccatgccgtatcaaaataggtaaagcctgcctccagaaacaaatctgtcatttgtttcgtctgttctatgtcaattacgccgtctttttgcggcagcctcatcaggccaaaacccagcttctttatttcctcacctaaatatgccatctttgtgcttcctcctataatccaaggccgtccacccatgacttaagatcagcggccttcacactgccgaaccgtctgccctgtttccagcgggtatcccgggaacagcagtcttttaatacccggtccgtgtcacccatgccgctgccgccggaagtcgcaaagggaatcactgtcttgcctgagaagtcatagctttccaggaatgtgttaatgatggtgggagctacgtaccaccagatggggtatgaaaacttgtatcaaagtaaatttccctttatttatcagtattttaacaccgtacacacttccttctattctgtgtgaaaaaggcataattctttccctaagtcccattcttctcttcttacatgatatcccttgattattttgaagcttccttattgcagcttattcaacgctctaaccaatttccggttctccctcttcagattttcgttttcatccaacaacctttccatttccctttgatataactctacctgtttctccaggcttttatctcgcacctctctcttgatccgggcaagtgttccttgatcctgtttttctttctcttcatttaatatgtttctcacttgctcattcttataaaagaatcctttcgacaatcctgtatttctggaaagattggatactgataatggatttccctctgacacagtcctgtgaatctcagcaatagcaagttgtatctttttctcactttcctgctggttcgcttctttcattttattgtactttgccatcaacagcttccctcccagaccattttcttcctgctgaaagaactcggccgacttgctagccacttcctcgtcaacccatccaatatatttctttactgtttcatccgtagaatagcccatgtactccctaattgcctgaatcgaagtgccatttcgataaaatgctttacataattctttttgatatccatttcctttaaagacatattcaccctccaatatgccagctctcatacattgtttcgtaattacctcttcaaaactccttgctgtgtatttcttatccctgtttagaaaaagcagtccctctatgtctatatgattcttttctgaatacttcaaaacaagcaagtgtaagatatccggtataggaacacttctgtttgtccccggcaccctcatccagctatcttcattctcataataaaaatctgtatttttcagcaagaacagctttcctttatcaatgcctgtatacaatagaatcagactcatgatacgcagctgttcagggaattctgaaagatggagcataagtaaatccagtttctgatccaaatccctgatctcatgatctttaggataacttttctttttataaaagaaaacaggcaccttgaaataatctatatgctccgtcacctgtagatattggagaaatgttatgacttcccgtatcttattattgtagctttgaggactgatcctctgtgtgctcagtttttcgaaatattcttttactgaattaacatttatccttgttattgctttttcctgctcctctaaatatttaagaaattcttttatataggtttgttttatgcgtattgtacccagattcagattcgtaaccgtaaaaagatatttcaaatactcctgaagcatctttcgattatcttccagttgaatatctaaaaaggagaagctttctattgtgctgctaagactgtatctttcaggagcgatatttaatttctccacataccagacattagcttcccaatcaatctctttcgcttccagaaataatctttttctacaaaatgcaataaaatttgtagcgtttacattatatcctcccatctgttttcttaacaatgaagcaaattcctcttcttgagttgtctccatttttagaatatcctgaagtcccgaactctctgcataacaaagcagatactttaaaaggagcaagtacctgtttcgcctcccttctttgtctttaaccgtttttacaacatagtttagcatctgttctatttgcaattttatatttttatttaatttttttccaaaatcccagtataagatttccgaatctacttcttttttgaaatgactgagatatggttcctgtaaaataatctggcaaatagattatctgattcagtggtttctttttcttcatactttttactggatcaaaatttatttctttacttttccctctaagtaccccatcttcgaaacaatcaataaatgtattacacaaagaccttttcttattgctgatggcttttctgctaatgtgccaattaattcatttagcactttaggctgtatcaaaaatatcacgtcttttaacattaatactttccctattcccacaatcttaaatcttcttccgtataatcttcttctccattcagaatcccctctctggcctcttgatgttgttgctaagctaatttgtcatccatactgctctgcttgaatgtcagagacttgctctgtataatgtcaatgaacattctacagaaagagaaagtcacagaagaccctcccgctaagttgtgtcctctgagactcatgataaaaccatgattattgtatcagagtacacggaatctgacaagggggatggcgtaattactatccattgtaacgaaaattgtatatgccccatatgccggtcccctgtcagccaccgtgactggaaaccacgaatcatgaagctggatggcggacaggtggtgtggctgatgattgagcggagacggtgtgacaatgagggctgccggaggcttcacagtcttctccctgataagctcgtcccttataagcattatggctccgaccttatcgctgccgtgctggatggtgatatcatgccggaggataccatgaacgaggattatccttgtgatgaaaccatacggcggtggcaccactggcttatggcaaacttctcccggacagaaggttactgtcggcaggctatgagcctcttaaggaatcccggactggccggcgcggccattttggaaacaattaggaaatcctgtgacaggtggcttcccgctgtcctgcgcatggtctataactcaggcggtttcctggtatccgtctgaggacatcttatatgcacccactttgttttggctgtcagcgctttctgcggtatgctgtccaaaaaggaggtgcataccatgcagacaatcaaaaaagatttaaactggagggataacgaggcgctctcacgctacaccttgatcgcgccactgcttgatgagagcctggatcccgccaaacgcagccagctgcgggaagaagcagcctcaaagtcaggcttatccgagcgtaccatcttccggtaccttgccgcctatgaagaaaaaggcttcgagggtctcaaacccgtcgtgccggctcaggcggttgtctccgggaggctgccggataattaccggaagattgtggagcaggcaatccaactgaggaaggaagtacccaggcggagcgtggagcagatcatcttcatcctggagcaggagggctgggcggagccgggcgtactcaagcgccctaccctgcagcgtcacctttataaagccggtttcggcacgagacagatgcagacatacgcaagcgcacgcgaaagctcgtccaaacgtttctgcaagcccaacaggatgatgatgctgcaggctgatatcaagtatgggtgtaagctccccatagggaaaaacggggcgatggtgcagacatatctgtcctccgccatcgatgaccactccagatacctggtccattcccggttttatgacaaccaggaggaaagcatcgtggaggataccttccggaacgtcctcttgaaggccggggcttgtgatgccgtatactttgacaacggttcgcagtatgtggcaaaacagctgaaattctcccttgccagacttgggattacggttcggcacgcaaaagtccgcagcggaaaatcaaaggggaaaatagaaaaattccatcaggtggtcgatgcttttctcagggaggcccggatccataaggtcaaaacactggaagagcttaaccggcactggaaaaactacctggaggaatactaccataagcagccgcacgagggcatccgggagtattatgagagccttggcatgcccgtcccaccagaagggatcacccctctccaggagtggaaccgggactgccggcctttaaagttcctggatacatccgtagtggcggaagcgttcctccatcatgaagaacgccttgttgacaagggcggctgtatcagctttcagggccgcaaatatgagacaaaaccgtcccttatcggtttccgggtggagatttcctatgaccctgcttcgccggaaaccatcacgatccgccataaagggattgaaccgtttaccgcaaagccgctcgaaatgaggccgttttgtgataaaaaagaccccctgccgatttccatgcaggaaacggagccggataattcccgtatgctggaggcgctggaaaagaagagcgcagcatccaaaaagcacatggcagatgccatctctttcggacagtacaggaaggatggtggcagcaatgtataaagctttttacgaaatgcagcgtctccctttcgtgcgcgatatcccgtcggggatgctgtatgagtcaccggcgatggcggacacccttgggcgcctgtcttatgtggcagaccgccagctgttcgccgtggtgacggcggatgccgggtgcggcaagtcaacgctggtgcgccgttttgtggagacgctccccaaagaggaatatatcttcctctacctgtcggactccaaactgaccccaagatggttctacaaaggcatgctcgaccagctgggcgtggaatcaaagttctaccgcggcgatgccaagaggcagcttcagaaggaggtggagatcatccgcggcgtgcagggcaggaaagtcgtctgcatcctggatgaagcacaccttctggaaaaagagaccattgaggaattccgcttcctgctgaattataaattcgattctatgagccctatggcactcgtgctcgtcgggcagacggagctgtgggataaactccggctccagcggtatgcggccgtcaggcagcggattgatttaagctgcatcctgccccatcttgaccgtgcgcagacggaaagatatatccgttcccaccttgcgtatgccggaggcaggcaggatatctttaccgataaggccatggacgagatcttccgcgagtccacggggatcccaaggcgcatcaaccggatctgtaacggctgcctgatgtacgccagccagcagggaaagcgtctcacggacgaacatcaggtaaggtttgtcctcgaacatgagatgctgggaggtgaggcctgatggttcagaacaaagaacatcgcccggcagagacctttgctgaccgcatgcgccagtccggcgtattggatctgctggaggaatacatggacatccgggacgaactggaggaagccctcaattccatagaactgctccatggggatatcaggatcgccatggatgacatcagcggacagcttgaagatcttcaggagcatatggataacgtcagaagtaaactgcgcaggttcaaatcgccgcatgcaaagcagtatgaagttgtcaaagatcaagggtaagtaagtaataatccgtatcttgacaaaataagaaatcccccagcacttaccgggggaagatctgttttttactttttaagtttgctgcggcaatcatcaggcagattggaggaccatgggagaagctccagcatttcttcctttgccggaaacgcaccgagttctttcatcttttccatcacatatgtgagatagttgtatggcttcagtccattcagaagcgcagtttctgtgatgctgtacacagtcgcactggcctgtgccccgcggatgcttttggcaaacagccagttgcgtctccctatggcaaaatttttcagtgcccgctctgcagctagattgtcaatactcagatggccatcttccagataccttttcagataggtttcctggttcagcgtatacaggaccgcctctccgatcttagaagatctgtccacagcatcctccagggtatgaagccactcgaagaaagcctctaaaagcggctttgcctgcttttgacgctcttcatacctttcttccggtgacttgtcacggatcatctcttcgatcttatagaacatcccgatccgttccattgcctgatatgcggttgtttccttcagctgctctttggtaaagtcctttttcaaaacggtcagggattcatcaaatctgcgcctcgcatgggccatgcatcctgtcacggtgatcctttccggaaggctgtggtatgcctggtatccatcgcaggtgaaatatccctggtactgatccccaaggaattccaccggatgatatcccgcccgggttctttcgtattggaagaggaccatccggggtgagccgctgtattcatcagtgagatagacccacatccagttctgggtggaacctttctgttccggctcatcgattacctgaacacgggtttcatccccatgagcgtaccggctccggaggaattcttccttcatcagttcataaagcggctgcagataccggtccgcacactggatgatccaattcgccatggtctttgtggaaaggttcaggtcgtaacgggcgaattcccgttcctgacgcgcaaggggcatgccgcccacatactttgcgttcatgatgcctgccaccagggatggtgttgccacactgcctttgagaagggaaggcgccttttccggacgtttcatggccccgcattttgggcagctgtaaacataggtgacctcctccgccacttcaaaccgtgcaggcacaaacttcaggcgcttcaccgtctcttttgtcacgactttatatttggtattgcagtccggacagtttcggtccgcgccggtcagcttatactcaattacttccgttgtctcaaaggcggaaagatcttcctcctttttgccggaacgtttctttcttttataggaagacggatggatctcctccatttccggctccggcgcatcaggctctgcttcctgctctgcctcgttaaaaaggttcagctgcgtatagccatccgcatatttttcgctggatgggccaaactgtttccgctgcgcaagagtcagacggtcagaaagcatcgcgttcaggaattccagttcctttgttttttcttcgaggatctggatctttgtttcctgtttctgataatgctcccgcatggttttcatcagggagatgatatcctccctgctcatcttgttcagttgttcctctgtaaaaagcggatccataacacagcctcaactttctgaaatctctaccagaaagtataccagaaaaagcattccgttcctataggaaactgcattccgggacggaggaaaatccgcccaaaacaaagtgattttcggctttttgcgaattgacaggatccgggctcatatgacgatcttcgggtgacgttcttcaaatgcgccgctggggttcagggataaaccatcgcacagccaatggatctctttcagcgtaactttctgcagttcatccggtgtgtcaggccaatggaaggaatcgcggtccagccgtttcatcaggatccaaaaccctgacccgtcccactgaaggatcttgagcaatgtgcgcctgcgattgcagaacgcgaacatacagcgggagtacggatcgagatggaatttcagtttgatgatggccgctaaaccagtgcagctcttccggaggtccgtgcagccacatgccagatagaccgtagtacttccggaaaaatcaagcatagttctttaaggcctgaagcagggcagtcaacagtctggctggacagtccgcagcaacttcaatccggatattttccgggagacagatcatcacaggaggttttcctgtacctgctgtactgaaatggagttcatgttccgaagggagctttgcaaacaccggatcagaagcactttctgtctcagctgcttctgactggagctttcggatccagtaacccagtgtagactgtgggattccattctgctgacaccattctttgcgggataaaccgctttcctggaaagcatggaaccggtctgcccaaaggtcagcctttgaggttacattgtcattcgtatttattggtatcacctccatcatttgaacttatcttatcaaatgtggatggaaatttgcagatactgattattacctacttacaaatataatttaccgtgccaagataatctccttctccatatcttggtattgttaaattttttctttttacaacctccctataccatttcaccgcagtcggagaagcaatatatctcttgaaatcatcgatggttggttggctgttttcccatattttctcttttttataaatcttcggcccactccatatctttacatactggccattgtcagaaaaaaacctgattagaacggactcatcgacaattcttatgccatcaatttccagcgatgtaaagctatctatattcgtgcagaccaattgaatcattcgttcttcctgataaggttcaggaggaagaaatcctttggttatatctctaatcaatgcccaatcccttaataaaacctgctttcttagtttaagctgttttatggccttctttatctcttggcggtcttcatagtaacgtttgggatcgtaaggtgtcaccagatgctttatttcaattatcacaacatgattatcaaataaagctataacatcaaaatctgtatttcctatagatgatttaaattctatcttatctgtatagacattccataaggaagactgcgacaattgatttcttaaataggattcatactcatctccgattgccgcccgctttattttataatccagcataatctgctcaagcatccgggttatattaatttgttgaatcaaattaggggcaaataaaacccttttaccacttatttgaaccaacggttttgagaataaatcgccctctttcccgcgttgcggataatatataaaccactccaccagcttagcagccgtatttaaactcttgccatataatcgtgaaaaacttttgattaacaaatcaatatcaactactggacatagataattaaatcgatcacgttcaatttctttccaattatgatttaagatatttgaatatatttcactcattgtcaataaaaattcatgaacttctaggaaatcattcaatttaccatatggtaatgtttgccttaaataggctggaaaaatatccgtctgctttataattttcattgtgcagttagcagataaattacaacgcaggtagacctccaattccagttcaaaaatgcttctccacaaatccaactttattctcttggcaaggcgtattataaacttatttccattaattattctattttgatttgatatcaataaatcaatactattttggaatcttctggcctctctgcgtattcctgcaacaaaatcaattaaactcgcttcattggaattgggcgcgaaaactataatatcatcatctgtatccgtttttccaagtttaacagagtaatctttatatatataaagggaccataatccgtttactaattcacaaaaatttgaatgatgaacgaactccataatatccggacattgcaaacattgctcatatgttagattatcgcaaggtttttcaaaattactgtcataataatataaataaggaattgaataatctatcagttctattagattttcactattctgtgatgttgaatatctcataccaggatagatttcagattctacatttgcaaccaaatgctttatccctgtgaatggctttttaccatctatgtcattcaactcaataccaagtttatgctgatcctcaaaaaacgaaattaatgccctcaattgataatccaatggatagttcataaattccgtcttttctctgacagcattatttttttttcatgttactataaatagcctcataagccaaccccagttccatcatcataaatccaaagtctgtttcatatttttcatccattgacattatcatctgtactaaagattctaaatctgaatctttgtaattatatgaaattggcgagccaagaaggttgcgatacaatacaatctttttaaatttctccggatttccttgatatatgttgtatagttcattaatgtccattttaaaccaccttttaaattacaatttcagccacctaatcatctaactccattatacaatataccgaaataaaaatacagcagtgtatatactctcatacatacactgctcttcttcctatttataagtttccatctttataagtttccatccttacccttttgtggaaaccacttattccgccaccgatatccatcatagttttcacagctatatgcaatgagatggtctgactccatagaaaactctgcttctgtcgcttcctcgtataatccattgccactctgattttaaactaatttcaatccctataataaatatcccttgtataaaccttttccatcacatcagccaattcgtcactataccggttggctataataatatgcgatttttccttaaaatcctccaatgatttctctaccggacagtcacagaactgaccttcttttaatgcaggttcatatactatcatccttattccatgccttttgagacggcgcataacaccttgtatggacgattgacggaagttatccgagcctgctttcatggtgaggcggaaaattcctaccgtgcatccctctgattcatacactttgttccccaccctttccaatatcctctgggctacaaagtcctttcgtatacggttggattccacaatcgcccttattaactgttccggaatatctttataattcgccagaagctgctttgtatccttaggcagacaatatccaccgtatccaaaggagggattgttataatgattccctattcttgggtcgagacatacgccttcaataatctgtctggtatttaaattccttgcctctccataagtgtccagttcattaaaaaatgaaatccgcagcgccagatatgtattggcaaacaactttactgcttctgcttccgtactattggtgagaagcactggaatttctttcttccgggccccattctccagcatatttgcaaacagatgcgctttatttagcaggactctgtcatttaactctgttcccacaataattctggaaggatataaattgtcgtataaggcttttccttctctcagaaactcgggtgaaaacatgatatttctataattcagctttttacgaatctcctctgtatagcccacaagaacggttgacttgataacaattatggcattggggtttacagccttgacctggcttatggcactttccactgtagtagtatcaaaatagtttttaaccgggtcataattggtaggcgtgctgataatcacatattcagcttctttataagctgattctccatctgtcgtgaccttaagatctaaatttcctttttttagataccgctctaattccctgtcttcaatcggtgaacaaccattgtttattaattcgaccttgtccttcataatgtccacgcctgtgaccttatgatgttgtgccaaaagaacagcattggctagtccaacataccccaaccctgcaactgcaatattcataagcatattctccttaataactctttggctgcattcccaagactaagaggcaaaaaacggctccctcctcctccggccataatcactgcgtatgtattcactgtccccttccccctgatttcagctgttttgtccggattccattttggttcatccattgattcatgccccgccccttgatatacaaatggtaatccggactttctgtttccatatccactaattcaaaatagtctccctggtccaactcctcatttatcactcctttgggagagacgattatcatatcttttatctgtgtcctattattatccctgcctgtcacaatatagtaatcacggaacatatactgataggagcttctggtaatctcatcgtccaaaaaaattactttgtaatcctctggaagctgctcaagaccttttaccaggtttcttgtcatttccatgttctctatctcatatttgtccatccggtaaatcacattataggaactccaaacaaagattgaaataaaaacagctatcaatcccatacaagccattctctgctttttatgaaatacgaatattgacataagaattacgatagccaatgcaccatagacggtcagcccctgggccagattacggatagcaccgtatccatgtctgcactgggccagattgcagaatatattaatagtcatcgtagtatggggccatgcaaccaccccattcaccttacctgcgatattaacaagaaaaaataaatataccgagcccatgattaaaaagatatatcttctgcgttttataaaaagagagcctttctccagaaaaaaatacatgcccattaacaccggtatcgatatggaagactccagatatcttccataaataagcttgtcgcatcttctaaccatttctccggtataatacagataaatatcggagaagaaaaaaagacctcccaaggcaaatgcaccaacaaagcataaaagggaaaatacactaatcaaatggatgcagtatcccccttcactggatttgtatctgaaacagcagaccaaggtgacacacagccccagacaaacaagaccgccactgccggtaaacacattaaatagccagccgtatataatctttattatggtttgaaggccggtaaaggacagcaatctctcccacatgtttgcatcccaaaaggaaaatgtactgtttaccgtgttcacacccgcattgaatacatactgctttaccagcccgtccaccaacctgtcagcaatcagcaaaaccatagctgtaatcagataaactccgattctcagatttgcctttttccgaacaaaacgtatgtatacaacggtcagaaacgtggccagaaccaccacaatgcctctttgatgtgccatatacgcaaatacagaggaacacgcaattaagatgctgtcccttacctgtttcccggcatccttatcttcatggattctcagaagaagaaggaggatcatccaaggcgagaccagaagaacggtctccgcccatgtgtattttatattcaatgttagcgccggcaaaaaggcggttacgcctgctatgagaaatgcattttcctttttttgtatatccaaataatccatggatattctatatgcgatgacaggaattacccctgccgctaaaacattcaacagcagcatggcccgatacagcacaatcggggaacggaacagataaaataatggcaaatataaaatcgttactccatatttgtaataatacccgtctgcatacagatattcattccaatcacagccgcttatataagccggtaccgcgattgtattcaatccatcacaaaaaacaggtacagtcaaaaaaaggcatggaatactgtttattaaaacaaacgcggcatacaaaaaaatctcatacttgtattttcttatatttatttttctcttatgcatggggacttccttcgctattactgtgtttttgctgaaaatgtgtatatgatatctgccatcaaaaatccgcctatatcccctaacacattcacaaaccgataaagcagaatcgcttccagtattatcttctgatcaaacgaggctgataaaattacaaccgtgacagcttcccttacacctatccctcctggagctcccggtatcacaaaccccgctgcccatccaaacagatatcctcccataagcaacgggacctgtgacactaatacattttcccccaatacgacagatacgatgaagtaaaacataatacctgtataaatacccaggaagaaataataggccatacagaacatacctctgggaacaatctctctcactactttctttccgaaccgtaacttccggcggtctcctttcttcctgcgaatttgtatgccaatgataccagcaatgactgctagcaggattaggattccacctccaaagcataatacccaaaggcgctgttgaagattataatataaccatatgtccctaattcctcctctgcagagcattatggacaacagagccactgataccagattcatcagaatatccccaaatgttgacaaggccacctttccatggctgatattctgtctcacagctatttcattccgtccaacatattgaaacacatttccgggcaggtatttatatagatttgccttacatacaacaaaggctaccagaggatagggtatcttaattccggatatatattccgtgatgcatttccagggaactcccactattaccatatgtacggcaaacagtaagctcaaaagcattagataccccaggcggccggtttctagaatctgctccggcttcagatgaaaggaacacagcttcctgataaggaagaatacagaaacgacagtcactccagttcccattgcttttatgacccttttgctcattcctccccctttcatttacgggaaaactccaacatctttctgccagctttcaccagggaaggtacatgcatcagaatatttgaatatccctgattggctaatgggcaggcgcagttttgggattttatataggctctcacctcttcagccctgggagaacgccataatttctggaaatcatactcataatctctcaggttgcccatctccttctcatatccaagaacacagcatggccacacccctccatcataattgatatggacattggaaactcccgcataacatggaatcacctgctttcccgtttctaatatcttccctgcaatttcataataaaccacacgcagtgcttctgttgtcttggctaatgatttctttgacccaatattgtcctctacttttcctgcgaattccttaatcagtttctgataaacctccgccggcggggttatattgtctcccaggttaaaaaactctgtgcggcattccgccacttcattccggtaactctccacgcccagtccatgaacgaaatcctctatttcatccagatagtcaatattaaaattggatacaacggttcccaattccaaatgaaaattatcatagcaatcttctagtcttttaagtgatacaattgtctttaaaagctggttaaaattcccctctacaccacggatttcatcgtgtaattttcccactccgtcaatagagggtttgacggtcacaggcacgtttttatcatactgacggacgattctgatgattttttccgtatgctctgcgattctttctgtcataattccgttggtaggggtatgtactacccttggctttatatatttacatgccagttccacgatttccggcaaatctggtctgagaaacggctctccgccgctcatattgaaaaaataaaccggtctcatattcttaaatatcttttcaatctcatccagtctcaaatcttttttggctctggatggatcctgacagaacatagctccaatctggcatgttttacattttgactgacatgctgctgtcactgaataggtcaatgttatgggctggaaatctttgtatccaaaccaacggtttaacctataagaaatcaattccggccctaatataaaaaataagtcttgttttttcatttatttctcaactttcgcaatggtataattaatatgagaatggattgattttatcttctttggcatgggcagcttttctacaagataaaccagctttatccataggggaaatctgttttgagccagcatctgggtatagggagtttcccaatccattgtgttaaaatccacattcatcctgtgcagtctcacatcccgaaatcccagagaatccggccacaccggacaatccacaaaaccggtttccacgattgtcagcccatgtttctctaacctttttcttataaagccgcgcttgttgtaccttatatctccatgtgtccatggaatccctgtttttttatggacaagcctgtggaccggaaaaccaatatttcctgcgttaaccgagaacacagccacatattttttactgatacgtttcatttcctcaatcagcttatctggctccggacaagtcggaaggtatgcgaaattccatacaaaatcataggacttgtcctgaaaggagctttgcaaaatgtcatcttcatgaacccattctattttgtgcgccgcaccaatctttttccactcagatatatatttgggattgccgttaaccagtgtaatcttttgtgcacacgttccaaatcctaaggaataaatagatggcatggccttagctccgtgagccggcatttccagcactgtctttatatcatgtttcactccaaatgaagatagtttccgccccacggaaaaccgttcatatattacgccaaatacctctttttccacgtccgcctcctgttataaatacccattttcctttgcccattcaactgacagcctgattccggtatccagatttatttggggtgcgtatcccaataccctgcgtgccttacttatatcacaggaatgatcttttgccaggaaatcaattctacctttattaacaaaaccagcttttttaaacataacctttgatattccatcaatcacatttgccagacaaacagacattgtatatcctatattcatatgaatcagactgcttcctgtatatttagctatacactccaaatattctttgaccgtgcagtcttgttctgcgcctaaattaaaaatttcattatacgcattttcattcagaacagacaataaaaacccatcaacaatatcagacacatacgtaggatgaaggtaagcctttccatttgtagtcagaacaaacctcttctttttaatgcttctgtataaggcagtccttctcacatcacctgctccataaacaaagcaaggccttaaaatagtatatggcatcatattcttacatcgttgtataaccgcctgttccgcaagcattttcgtttcactataagggttggtgggatgatagggggcatcctccgatacattccgtccttccaaaccagtcacaaatggcgcgctgcaaaatatgaactgctttactctatgtttaatggccagttcagccagttttaatgtggcaagataattcaccttgtaataatattcataaggtatcccataatgtcctaattgagccgccgcatgtattaccacatctatcccctgcatctggtcatctatcgtttcaatctcccgcaaatcacagatgatattctccactggttttgaaaactctccatcggatattttctttctggttacacataccacttcatttccatttaacagcaatgcttccgtaagatgtttccctatgaatccagttgctcctgtaactagtaaacgcatcctcccgtacctccatctatcattttgtccagcttgtccaccacctcaaccattctgtcccaggaaaaccgatacgcatcttttcgtacattttccgtgaattcttccgcccttccttctttaaaatagcggattatcgcctctgccaattctgtatggttcccagcctccaccacgtatccggtttttccatcctggaccacgtcaggcagcccgcccacattggtaaccaccactggtttttcaaatccaaaggcaatctgcacgattccactctgcgtggcgctttcataaggcagaataactaaatcgcaggctgaaaaatatggttcgacctcccggtcaggtatgtagccatcacatattcttatataatctgccatggaattttcatcaatcagcttcaaatagctctccctgtcactaccaaaatcccccacaatcaacagctttacctgttcacatgattccaccacggcgggcagcgctcttataagatgcttcaggcctttatattcccttataaaaccaaagaacaacagcactttgtacccgctatcaatacccagccgttttctgctttcttccctggttatattactgaatttaaacgcattataagtgggatggacggtctgatgatacagagcctccggaatcatctgaagcaaatccgctgcatctttctttgactggacaataaacccgtttcctctggacagtaccattcgggttaaaaatcggtctcccgggaaatgttcatgaggtaatacattatgacatacaaacagaattctgcacctttttaacagacaggccaatgccaaataacagggggtaaaatatggatgccaccattggatgataatcagatccggctttagctgtttgatttttttgctgcactcaatccaattccaaggagccattgtgttaatccagtatttggtcccttttattttgaaactgtcattgctgtaatccttttgttccttccgaaaaaggaatcggggatactgcagccggtaggacaccatttcaaccagataattttcagaaagagcacggtacataaggctggtataatgtgaaattccccctttatacggataaacagggccaatcagaacaactcgtttcttactatcattcatgggcatccccctctgcatcacctgttccttcactatattcctttatttctcttttattttgtaagatatcatattcaatccgcctaacatgatattgggtgtcttccagcaacttcttattggatgcaagtatatcacctaaaagtcccatcattaacgtgagaaatccaattataattaacgtacatgccaaaatcagagactgcacatgtccggttcctgtgcccttaaaatagaagatcaaaaaacggattccaatcattccaccaactaatatgggaggaatgcacagaaatgtaaaacactttaacggtttatacatcatatacgccctgataattgtaatcatggatttctttacatacccccatatgctgttaaacagcctggaaggacgcagttctccattggtccttacaggtacgcttgtcatcggtatcttttccctgccggcctgtacaatggtctctaacgtatatgtatagtcattaactacattcatcctcatggccgcttctctactgtatgcccgaaatccactgggcgcgtctggaatctgagtattggaagcttttctcactacccagcttccaaaatgctgcagctttttcttaacgggggaaaaatgttctgttttatcaatgggtcttgctcccactacgatatcggcctcttcccgaagaataggctctatcagtttgctgatatcctccgcgcaatactggttatcagcatctgtattcacgataatatctgcccctttgctgagacatccatctatcccagccataaagcctttcgcaaggcctttattttgtttaaaattcacaatatagtttacgccccactgcctggctgcctgaagggtagcatccctgctgccgtcatttatgattagatattcgatacaatcgattccctcaagttttctgggcaatgcgtccaatgcaatgtttaatgtttccgcctcgttataacaaggcatctgaatgattagcttcatatatttatccatcgtatttttcttatttctcattgtaataaacttcaaaatgggcggactccctctttgtcccataggtctgacttaattcctttgaaaagatatcccgtctgctggtcaccacaatatcttcctgtgtcacatcccctatgcttccatagggttcttttaacacgtgaaccgatttctcttttagacagaattgaagcagatccacatatccgtaaccatctgagtatagaaaaacaatcctttcatagtctccaaccatgtcctttatttgctctgcgatcatgatgtcttgataattatccttgttgtatttgtaattcatctggacgcatacatccattcccagcccccattgaatcacggcccataaaaaggccaaataccaaaaccgttctctttgcctcacaatccacagcacacccgccatggttaaacccaaaaacacgcctcccaaatatacatttttcgtaaatgcgaatactctgtttgacgataattccaaagcgtatgccaccgccggaatcgaatgtctgtaaataccataggcaccagatgaacttatcttccaattgacaaggtacatcataacactttggaaacatataattccaaagctcactttccacatacttgggctgcggaccattgctgtcagccctgttccaataaagattgggaggagtatctcgctgtagcggccgtatataacaccatctacacgcggagtgtcaatcatgaacaaagatacaatactaagggtaaacaatgctgatagtaaaacgaaacgcgcggcaaccattttatgccttatactgcaggccgtcatggaatgtaaagacattattccccaataaaacaaacctccggttgcacttcccaaataaaacagcttaccgcctaaggagcagatgaaatctgccatccccttaatatttgtcagtttccccagcttttcaatctgaccgctgaaatcattcaaggctgccagggaacctcctgatacaccataaatttcgtctatatagttgttcttatataccattcctgctatgataaggattccataggccaatgctcctgtaaggacatgtgcacgtatatctttatttattaccgcttcccaaaccagcaccagccatagagccattccgattccaagggttctcatgtgtacgaaatacaggccagcagatattgctgccattgctcccatgtaataagcgcttggcttttggaaaaacatcaggactgaggctataagcagaaggtacagcaatgcaagaaggatttctggcagtgtcgtctgtgcatataccataaaagatgaatagagaatggccagtcctgaaaacaatgtcataaagggatatgcaggagcatgaaacaggattaccaaaatcttttttagaagcacatagcaccagacaatcagtatgaaatttatacttacagctattctgtacaaaacaacgggattggaacaccatttaagcagcggcgccataagcattccgtatccaaaagaataatatggatggatgcctgaaacctcattccagtcataccccagaagcctggcgccatgactccagtacccaaattcatccggaaaacggattggtccgaatagctttcctattccatgcatgtaaacggataacaggatcagaaaaaaacaaaattccatatatgcttctgcttttccctttttcatattttcatcctaatccagctttttgcaaagaaatagctagcagttacccactaactatttccccacagaagcctatgcgaattttaattatctgtaagctgcgaaactacctgacggtccctttaccagagtaaatgtaccataaacatctgttgaaaatgtcatagtatcactatcatcatccgtatcaacaatcactgaagtggtaccatctgactggacaaagattaatgcatattcataaccatccgttttaaaattagctggaatgccaattttaaattcaatgggtctggcagccttccctactttggtaaaattattattaatgtcagatattccaagccatatatccagcgccggtcccgaaacaatctccggtgaaattgacttcagctcttccagctttttcatcatacatgccttggaatcctctccgcacacgctgttctcaataacagcaaatggcttctgattcgtccctgcgccaacggctgcggctacatccgagtaaggtgtcgtcactataaccccggcaactgaatttgctgaataacggccagcaactgttgtgaacacttttactcccttcaccataacgctgtctaaagctgatgatacgctactactattggttgttacagtgcctcctgaactagaacctccgcctgacgatgagcctgaattgtttggaacatccggaatgtctggtacatccggcacgtccggaacatccggcacgtccggcacatccggtatatctggtacatcgggcgtatctggaacatcgggttcatctggcgtgtccggtgtatcctgtgtcccaccactgattttggaactaaatacagctccaggattagcgtgagctatcagaactggtgacacggccagtacacccattaaagaaaacgttaccgccttttttaacaaaagcttttttctcattccttttcctcctgctctttttctatagtcacacagaatctctcatacaaggcttcttcttttcttctgtgacatgactaccgaacgtacataattacattggtcattatataacactttttagttgttgtctataactactattaagttttttataatttttatttaattgctaatattaatcccagaaggtggtaaacaattatgaaaaatctaaaaaagctacggaatagcaggcatctgagccagtttaagcttgcagaacttttccatatcagccaacagtctgtttggaaatatgaaaatgacctggcacagcctgatctggaactaatcattgcatttgctaactttttcaatacatctattgattatcttgtgggaaatacgaataatccaagaaagtatgaaaccctgtctgaaacagagctaaatgaagatgaactggcacacttacgtttatatcgtgcttctgctccagaggtaagaaagctgtcagaacaaatgatgcagctatactttgatatgcagaaaggttctgaaaaagagtaaaattatcaataccgtttacaattttgaaaaaacgggttccaaagaacccgtcatggtgataaattacgacaagcagcctgaccttttgcaataaagcttgattagtcaagcactatactactgaagcttatttccaagtcatggaacacatgtgtctttatcgtactgtcaaaccgataaagggcggctggtgacaaattttcaaaatcatagacaataacaatttttcgttctgtatccactatccaatattctctaacaccattcatttgatacagagaaagttttagataataatccatgctccggctggacggggatacaatttcaacaatccagtcaggagcacctttacaacctttatcattaagtttactggaatcgcagataacgcttatgtcaggctctacataattttcataatcctcgctattgtcatccgtttttaaaaaaactgcaaacggtgccggatacactttacagttccctttatttttgtctatataattgccaattgtctttgtaaaaaacgcgacgatttcttgatgctttcgacttggtggcgccatatcaaaaatctcaccttcaattaattcggctcgctttccttctggcaatgcataaatatccgctatcgtataatattgccgatttaataatggcatggcatatacctccttttattttattatacacagataaaaacacttttacaataattatctgctccccacatgattaaaggttactgttcagatgccctctgaacagtaaccaaagcacggtcaggagctgttttctggttaatgccttattcctgttgtgtgcaagcatcatcaggcagtcgaattccattggttttaagctgatttcctgtccttctctcgttacagttcttttttccgggtcaatgacgatatccttaatgtggatctccggttcctcctgttgaaagcgttttagtatcttgtcgatacgaaccagcaattccagcatttcaaaaggctttaccatatagtcctctgcgccgcctgtcagccctttgaccttatctgacagttcacctcttgctgtaaggaagataacaggcactccatagcttttaagttccggaagaagggcaaaaccgtcctttcccggcagcatgatgtccacaactgccaatccataatcgtggttcttaacaagcgattcacttgccatatctccgtcctgaaaagaagccacttcatatccggtcgcttctaagcttgtacaaatcagtgataaaatcgcttaaaagacaggacagctggttagataatctagcccgccgccctgtcttttaatgctgttgacgctccttatacttttttagcccccaaccaaagcttgccatcaggtccacccatatccatgatattcataaggacctgctgcttttgataattcattcatcttatttcccttaaccgtaaaaaagtttcatataaatccagagccccatatccccattccctgttgggatatgatagtgctggatttcgttttgctcctcttattaaaaatgctttgatggtggcttcgctcatcgccatgttatgtccttctataatgccccagcttaaaagattagcgactgcaccagcaacatgggcggccgcaaccgaggttcctgttcgggtagtcatgggaatggagtcttggttcctgcgccctatcgatggcccgcttacattaaccccaggggccgccaaatccggtttaattactccgcctattgtatatccacggccggaatgaatgtagatgctgttatttaaatgattgtaggcgcctactgtgattggagaggtagaatctcccgggagggttatggtcgtatatgggctgggagtcagaaacacggtttcatcggaaatcaggttatgggccggaagccacatattaaattgccctgtgagatactgggtattatacacgcgtattctccaaattccatttgttggggcttcaaaacggataaaaacaagctgtttgcctgcgcctgtctcaatcagctggtaattaactgtaatgaccgtgggttctaagaggaacccaatagaggtttcatttcttcctatgataggaatgcggcctatggattcaccactgggagatacaaatccaacggaatatgtatcagcggtggcggcccagagttctactacaaatccacgctgggattccgcattcccgactcggatttccacatcaacggactcttcccccatgggtacagaacccatatagtgatgaccccggccagtctcattgcctgcggcaattaccgtagccattcctaaatttcggctgatatcttgaatcatcacattaagcggggacgttccctcatggctgcccagattggagccgattcccagcagaacgaccagaggctttctctggctgtatgcctccacgcgcaggtacttaatgcccatcataatatcattctcctgataagcatcagcgtcattactgacaagatagaaatcgcgcagatattgtttggctggttttaatttgacgattaccagttcacattccggggcagctcctgtaaaatcctgattaggcaggactcctccggcagcgatacccgccagaaaggttccatgtccgttggtatcggtagaaggcaccacggtaagaggattatcagattccagtgcctcgttaatctgctcccgcgtgtactctgtgccataggttgccccgctggcattatagcggttaggtacgccggcaggaaggaggcttttatcttccggaaggctctgatcccaaatactcaagattctggtagttccatcctgattgcgaaaaagaggattggtatagtcaattcccgtgtctatgatgccgattataacacctctgccttgattgctcagggcaggtgatgcatgggttgctaaaataccggaagcgtccatgctggaactatctaacagtgtgtacagtccagggatactgtaataggtaaacttgcttagtgatatgggttctactgtatctagcggggtatatataatactgaaatcagtgcttacaaagtccatgcagaaaatatcttccgaattaccaggaaattgctgctggcttccataacggtagataaagtcagcaatggtctctgaagctgagttaatagggcattccgccatgatgtacctcatgcaggggatttgataacagtatatgcggaatttttctattttacgttccgggttgactcaccctccattaactccgccttaaacacccgcttctgatggtccgcatgattgcttaccacgtcaaacagtatcttaatggtggcttccgccatctcctccacgggctgccttatggtagtcagcgtcggattatagtaatgcgcaatgtcaagtccgtcaaatccagccaccgaatagtcttcgggtatcttcatgccgtattccgtgatggccttgcaggcgccgatggcgatactgtctgatatggcatacacagctgtaaaatccgtctttttttcttccaggatccggctcatggccataaagccgtaatccatggtgtaacagtcccttcccacccctgaaaaaacacagagatcttcatccagttcgattccgttgtccttaagggccttgcggtatccttccagacgcagcctgccgatactctcatcatccttggtagctgccaggattaaaatcctcttatgaccaagcttacacaagtagtccgtcatcttatagctttccgcaaaatcatccacagaaacccaggaataaaacggcgattcttccagtgaatccgtcatcccaatggtactgagcacaaaggggaccgccagctgctccagcttctccttactgtgtgagaagaacccacccaggaatacaattccccttggtttcttctccttaatcagttcaagggccacatccacttcatcttcaccggcatccacatgctgcatgataaaagagtacttcttcttatgaatttccttttcaaaaatccggatcatcttgctgaaaaagggattgctgattcccttgattaaaaccgcgatagcctttgaatcagtgcgttttaaattgcgggcgctattgttaggaatataattatgctccttaaccacctgcataatcatatcctttgtctccggattgatatccggatgattgttaatggcccgtgacaccgtacttacgcccactccgcagattctggctacgtctttaatattaatcgattccataagaaatactcatcccctgtcatcctctgccgtaaagctttgccatcttcctgcactttacaacaatctcatcagttatttccccgggcatcatgcgccatctccagttttctcccagcgtggatggcgtattgatccgggcatctccgccaagacctaaataatcctggaccggaataaccgccagctttgccacgcttgacagtgcaaggcgcacgaaatcccaatggatttcctctacaggcgtatgcggattattcatataatccacggaaagctgtctgtcttcctcactcatctccccataccatcccctgatggtattattatcatgggttcctgtgtaaaccacgcagttagaagtgtagttatggggcagataatcactttcctccctggaatcaaaggcaaactccagcaccttcattcccgggaatcctgtatcttttactaattctagcacagatggggtcaaaaatccaaggtcttccgcaataatattaagttttccaaacttttcctgcatttttcggaaaatatccatgccagggccttttctccaggttccgtgaaccgccgtctggcttcctgccggtatggaatagtattcgtcaaagccacggaaatggtccacacgcaccacatcgtacatgcggaagctatattccatacgccgcatccaccattcatatccggtctccccatgatactcccagaggtacagcggattgccccacagctgtcccgtggcggaaaaaccgtcgggagggcagcccgccaccgccaccggattcctgtcctcatccagctggaacagctccggatggtaccatgtgtcggcgctgtccagcgccacatagatggggatatccccaatgatgcggattcccttttcattggcataggacttaagcgcgctccactgctcttcaaatttcatctggaggaacgcgtaaaagccggtctcatccgccagttcatgctgaagcgcctccatggcctcctgcttccggagacggatatccttatcccacagtgtccaggtcctgccctcatatcggttcttaaccgccatataaaagcagtactccaccgtctcaggccaaagtcttcctttggcctctgccgccgtatgccccttctccttccaccgtccatatgccctgcgaagcaatggaaaacggtttaaatacaatttcccaaaatcaatcttcctgggattgtcaccgaaatcggcagcagtacactctgcttctgtcaagagaccttcttccaccagtctgtccagattgataaaatacggattgcccgcgaaagctgaaaatgactgatagggggaatccccgtagctggttggccccagaggcagaatctgccagtaatgctgccccgccttctttaatgtatcaataaatccatatgcctctttagaaaacgctccgattccgtacttggacggcagactggcaaccggaagcaacataccacattcccgcatcgtgtctctcctttaattgtgtctggtttttccgtatacgtctatccctttactgcgccggcagccacacccttgatgatgtatttctggcagcttaaatagaaaatgatgattggcacaattgccaggaccagcatggccatcatggctcccatgtcaatggaaccgtaaccgcccttaagattctggataaccatgggtatggtgcctttttcctggggaagaatcaggctcggaagcagatagtcattccatatccacatggcatttaagattgcaaccgtgacagcagtcggccggagcatcggaaataccacatgaaaataagtctggacaggagaacagccgtcaatcatggccgcctcttcaatctccagcggaatcgccttcacaaacccgcaaaacaggaataccgcctgccctgcgccgaatcccagatacaaaagtataagtccatagatggaattcagatataagtcattggccgtcttcgacatggtgaacatgaccatctggaacggcacaatcatggcaaacacaaaaacataatagagaacgctgtaaaactttgttttaaccctggtaatataccatgcggtcatggaggtgaacagtacgattaccgccacggagcataccgtgataaacagggaacgcccaaacgccatgaaaaatcccgtcttcctcaccccttcaatatagttgccaaggcccacataggcttctgccaccgggaaccggaacggggcgtcgctgatatagagcttactcttaaaagcattcatgaaaaccaggaatatgggaaacagaaatgcaagagaaagtactgcaaagaatatcgtcatcatcatgcctgtaaatccgctgacctccatctgctggtcatctgcatttttatctttccttcccatcagttttccacctccttacgccttgttatataaagctgtgtcagggcaatgaccgccaccatgatgaaaaatacaactgcttttgcctgacccacgccttcccagcccaccctgccgtaaaatgtactgtaaatatccagcgccagcatactggtctgccttcccggacctcccgccgtcagggccaggttctggtcaaacagcttaaaggaatttgtcagggttaagaaaagacagattgtaaaggacggcatcaccatcgggatcgtaatccggcgcagtgcctgtgtcttcgtagctccgtcaatcttagccgcctcaataagatccggtgaaacgttctggagaccggcaatatagataatcatcatatatccaatcagctgccagttcatcaacatgaccaggccccagaaaccatatctggcatcaaatgacagggtaactccgaacttcatcaggattccgtttaacaaaagctgccagatatagcccaggacaatgccgccgattaagttaggcatgaagaaaacggttctgaacagatttgtccccttgattcctcttgtcagggcataggccatcaaaaacccaagcacattgattgtaacaacggatactatggtaaacttcacggtaaataacagggcatttataaagttctggtctgaaaatatctttttataattatttatgcccacccacgcggcatcccttaccgtagtaaattctgtaaaagacagatagataccaatgataaacggatacaggaatgcaatgataaacgcaatcagcgttggcagcacaaaaatcggaaaatatcgtttcattgatttttgcatggcgcaccctccttaaaaatcacatgataattctcatccctcaggcaaagaaacgggtgaggaagttcccttacgctcacccatgtcaagtccggtccttaaagtcttatttggtcatggccttttcactttcccagcctgccttcatatcatccacaacagcctgccactctttcccgccctgggcatactgtaacagggatgctccaaagtcatccttaaaggtctggcttgggaaggaagtgaagttccaggatatggaatacagattgccattactcatgtatctgtcaacttctttggccagtgggtcggatggcttctcatcggctgtaaaggtgtcaaatggcgcgataaagcccagcctgtttgttatatagtccttacctgtctcagagctgaacagccatgttaagaagtcaagggacgcctgctggtcctcagcctttgcctggctgttgatggtgaaaaagttctcggtaccgatacataacccctgcttctcttcgccggccattccggtgtaaatcggaaggaatttcacatcttcttcttttacagtgttgccttcaacgccagccacctggctccatccccagttgccgttctgcaccatggcaaccttgcccagagcgaattcagccatggaatcctccacggtcttagcgcctaccatcttcgggtccgtacaggaattattcaaatacaaatcgaaaatgttcttaaaattatcggaatacctaaagtcgatagcgtccttgtcattcacaccgtcatctttatattcataataaaccggaaggtttgcaagatgggtctgccatctccagtcttcgccaggcgcgaaggatgtggaggcgaacacaccgtcaattcccaaatccgcttttcttgcctgcatatcctcggaaacagcctttagtgtatcaaagtcattaatctcatccatggatgctgccttagcgccgtccaatgcaaaatacttccgcatgattgcgtcattgtaaatgattccgtatccctctacaacataggggattccgtatacgccgtcaccatctgtaaccgccatggtcttatctaccaggtggccgtagatttccgtatcacttaaatcgcggcagtacttagcccatgacttatagccaatgggtccgttaatctggaacagtgtgggaggttccttcttcgccacttcagacttcagggtctgctcatacgtcccggccgccgcggtctggaccttcatcggtatcccggtctctgccgtgtacttctctgccagctctacccatacatctgcaacctcaggtttaaagttcaggtaataaatctgtccctttccatcggccgataccggttcccctgactgtgtcccctccgccgcttctcccgcgggggattgcgcggtccctgatggtttggaagaacacccggccagtgtgcctgccgccatagctgccgccagtgaaagtgctgcaagtttcctcagtttcataattatatcctccttccgtatccacgttctctgccgcggatactttccatactgtgatacatttgtacaatgtttccagaaaccttcccggtaacgatatcggtaacgtttccaataaccttgaattcaatatagcacaatatatgaggtaagacaagtattttttgattggaattcatatttttgttacaatatcataatttcatctctcacttttatgcaatcatcacaatccctgtctgattgttgtctcacgggccaccagctttgccacccagactgcggtcatgcagtcatacccatccagcgcttccctgttcatttcctgaagaaaccgttgaagccttgttccattggaatgcatgaatccggtataataacgccttccaagttcttccggttaccaaagtattttcaattattgcttcaattttttgttttttgtggtagtattcatttcaggggggcagcattccatacaacagcagaaaggcattaagataaaagaataaaagcaagggagtgataaaatgagcgataaaatattattagtagatgatgaaagagatatcgtagatttaattgcagaagttttacaacaagacgggttccggttgatccaaaaagcttactccggttcagaggcactaaggctatgcgaagaattcaacccggatatcgttgtattagacataatgctcccagacataaacggaatagaagtgtgtaaaaaaattcgtgagttttctatctgctctattcttttcttatcatcaaaaaatgatgatatcgacaaaatactcggactgtcatgtggtggcgatgattatatcacgaaacccttcagcccaagagaagttgtgtttcggataaaagcgcagcttcgccgtcaacaatatcatacggacaggcaattaaatgaaaaaaacaggattattgttgacagtctctcacttgacaaaggcagcagccgaatttataaagccggaaaagagattgccttaacaggacgggaatttcttcttttatcctatttaatggaaaatgcaaataaaattatcagcaaagaacaattatatgaacaggtctggggcgagtacagcagtatttgtgataacaccattatggtccatatacggcatatacgcgaaaagattgaggataccccctctgccccgcagcagctggttacagtcaaaggcttgggatataaattaaagaaaaggattgattaaatgaaaaaatcgggataccgttccattttgcatatctatttgatgttttttatagccttactcagtgttattgctttttccggaatatttctgctatcagtagtaagtgtcaataccccggatggagcaaccgtgagaagcaattatccaaaagaatttacagagagcttctccgaacaaattatttttattgatgacagaccacaaatcaaacagtctggcttagaattattacagacaaataatgccggattacaggtattagatggtggcggaaaggaactgattcactaccaaacgccggaaaacgcgaaaacattttattctgacacggaccttttacggctttaccagacaggacatctaaatgataatcagtcaacatcatttgttagcagcttaacatataataaaaaaaattacacatatattattcattttccagtgaatattgcaaaagtcaccatgtatttgaatggggaaaaatttacaacaggtaaaacaatcattttattatgtttgggtataacgcttttcatcatacttatggctggcataatatacggtttctggataaccaaaataataaaccgtataaccgtatctataaaggctgttgcaaaacgctcttatacgcctgcggttagtacaggcgtttttcaagatgtatttgaaagcttggattgtttagatactgaaatcaagaccagtgacaatataaaagaaaatacggaaacaatgcgaaaagaatggattgccaatattacgcatgatttaaaaactcctttatccccaataaaagggtacgccgaaattttatttgataacaaggatgtatcaagcgaacagataaagaaatattcaaatgtaattctaaaaaatgtttcttatatggagtccctgattgatgatttaaagctgacataccaattagagaatggtattgctccgcttcaatgtacagaacaaaattttatccgttttttaaaggaactggtgattaatgtgttaaatcatccagaatatgaagaacgcacaattcattttgattgtacaaaagagaatatcatgctctcttttgatcacaaattaatgacaagagcttttcagaatttgattatcaatgcttttgcacatggaaatgatgatacagaaatcacgataagaataaccgtattgaataatatacttcaaattattgtttccgataatggaaagggtatgaggccggaagaggttaatcatttattccaaagatattatcgtgggacaaatacagaaaagaaaacagcgggtacgggcttggggcttgcgataacaaaaagcatcaccgaagcccatggcggtaatatttccgttgaaagtgaaataggacttggaacagattttaaaatatgttttcccctaaattaaggttaattaaggtttcctgcaagttagattaaggttgatggcttattataaactataatagctgtcaaccttttttcttctataagggggtgaaaaggcttcctacatgacacgggcgcaacaaattgcagatgatgtatgttctaaacagtcattggaagctggttctatatctggtgcagcactgacaagtgatactgttttaaaagcagtagaaaatgcacttaaaccgaaggaaaagtaatgtatctttttaaagaaagcaggtgcggttttgaaaataattttaaagtacattgtaacaaatgttaaggaacgaaaagtcaggacaattgtgatgtttctttcaatccttttatccaccgtacttttatttgtttccttttcaatcggcacatcttatgaaaacgcgcagcggaaaatggcacgtggaatggcgggaagcgcaacggtagctgtgcgtttcaaggatacgaaccgtggaataaatacaaatgatattcccgccttatcctctatccaggccaaggtgggcatgttaaagggaacagcattatatcatgaaaacggatattatgaaacaattgatttgatagcttctgatttaacgcaattaaatcaaatcaataaacccagattagtcaacggggagggaataagagatttctcgggaaatcaagttatattgccggaccgctttacttctaaaataggaattgaaaaaggcgataccataacctttcaaataggcggcgtaccaatcgaatttaaagttactgaaattgcctcttatgatacagtttttttaaggcataccagaggcgcaaccgcattacttccagaaacaacactggcttccattttacagaaagaacatgggtatagcgaaatcttaatagagcctgttgaaagtgtttctaccaaagaattggtgggtatgctgtcggaagaactttctggggagcccgtaaccatctcggagattgtaaatgaaaaccaaatagcagctgatgcaaggcagaaatccatgcctttttttctaatcagtttcttttcgttgaccatgagtgttttcattatttacagcagttataaggtcattacgttggaccgtttacccattattggcacattccgcagcattggagcgacacaaaaaacggtaatccgcattttaatgcttgaaagcgcattatatggctgtatgggcggcattgcaggtataccccttggaattgttgttctaaaattaatactacggggtatgggtaatacgctatcacaaggtatagaaatacctgtggttattacaggcgcagcggtgctgctttcttttggtgtggcagtcgttgtttctgtattgagcgcctggatacctgtccgccgtgccagccgcttgcctattaagaatgttgtacttggcgtcgcggaagaaacacaagtatcaaatcgatttattgttggaattggtattgtattatttttgatctcagaaattttacccaaagtcgttaccggaaacatgctgtatattgcaggcggattttcattgctgggattgataattgcaacaatattggtcattcctcttataaccaattttttatcaagatgtctggaacatatatatgtaatcattttcaaaaatgaggggttgctggcttctaaaaatataaggaataataagaatattacccaaaatatcacgctgctgtttattagtatttctgccgtaattgcaattacagtagttggtaatttcgtaaatacgtatattacagatgtatttaatggtgcagaactacaaggctttgctgacggggaaatgagcccggagtttgttaaacatgtcgagggcatggacggtatagaaaacttattgccagtctacgtgtataataaccaaatgaaatgtgatgatattactttttctcgtttggaagcaaccgataatctagaattgtataatagaatgctgaacctgaactataccaataaaaaaatggaaacatcctctgtttcttcttttttaaaatcccgctctgtcgtattgagcgagaactgtctaaacagaacaggctgccaagttggagattccataaccattacaaatggtgtgggaagtaattcttatacgattgttgggagttttaaatcaagggcaactgatgttgaagcgattattccgtccacctatgctgtggcagacttcaatgctgttaattataacttccttgcttatacagctattgatcccgattctgtcatgattcaaatacgggatttatttggggatacacagaattggagcagaactgtggaagaatttaataccgatgccctttctacggtgggagcctttctgcaaccaatgcatagtatgacgtactttatattattgttggccgcggttggaattataaacaacctgctaattaattatatgcagaaacgccgttcgattgctatgtataaatctgtcggtctgagtaacaggcaaaatataaaaatgacgattattgaaagcttcacttctggaatgataggtgcctttattgcaataattatatcttatttagaaatacagactatttttatcgtagcaggtccaaaaatctcaatgctgccagaattggattttatgacgtttctatcggcaggggcaatgggagttttggttactttaacaggctctgttgtccctattgtgaaaagtaagaaaatgaaattagtggaagaaatcaaatttgaatagccggaggatttaaaaatgaaaccaattacaggcaatattgcaattgaaggaaaaaatataatgaaagattttaaaattggagaaacaacaaccagagttttaaaaaatgtgtccttaaaagttttaaagggagaatttgtttcaattatgggacagtctggttccggaaaaagtacacttctatatattttaggagggcttgatacaccaacagaaggtaccgtgtctatgaatggagcagatatctcccggtttaatgatgctaaaatgagtcagataagacgtcagaatatagggttcgtatttcaattctataatcttattcctaatttgaatgttgaggaaaatatcatgcttcctcttttgttagatggcaaaaagtctaaagactatcgaaaacagcttgataacatcttagagattgtggggctgtccgatagaaggaagcatacgcccagggaattgtcaggcggccagcagcaaagagtagcaatcgcccgcgctttaatcagcgatccggaaattttattcgcagatgaacccacgggaaacttagatagtaagacgggggctgaaatcatgaagctattacaatcaatcaataaaaacagcgggcagacgattatcatggtaacgcactctcccgaagcggcaaaaaacagcagccgtattattactgtaaaagacggaatgattgaatagctgtatatgacataagctaaacctaatctacctggccggtaaaaatccgcccggtaaaagacagattccgctgctctcttctgccgcatcttatgacagcggcgcaaggggcgcgcgtccccttgcgccaggatgtagatttagtgattctctatgtatgttactaattgctgatggtattcatcaagggtatccgtattttttgcggacatttgcccaaacaacaaatcggggagatagtgaggcgtcaagcccgcatcataatccgcttctcaacttctccattagggacgtatccatagaagttatcaccacaacaaatagattctgttccatggaactgtgcctctgcgatgttgatgccgccgtagtctggaagatctggaatatcaataccgtcaataaaagttaggggaatgcctgcagcatacgttgtgtgatttaacctcgccaaacaaatcctgcagcagcttcaacatacgattggccccatcgtgcttatataaattcatggcacaccccggattgaaataacagttttccgtgttgacctctgatatgctgcttctgatatatggaacccggcgcgccgccccggtggggcaaaccgcggaacaagtcccgcaatcaatacaaatggcaggatcaacttctaaccggccgctctgctctgctattgcatggacagggcagtttgcgacacacgcctcacagcctacacattcatcagaaatcatgtagctgaatgtgtcctctacacctactgttacaggcggggccatatccaagggtttactatttttcatggtctgttcctcccttgaaagataccctacagagactattcagaaaatcaccagaagcaaactgtgatttctgaatttttttaatatttgaattataccaaaagttcggcttatcaacaatcaactattatataaaagtggcagtcaaaacaagcagggcctgccgctttttaatcctgatgctctgctgaatacggctccgacaagtatacaccccgtgctgttcatacatactattacaggcactcctttctcaattttattgtttatttatcatatggtttcacattcctttcatttttatggtatacttcattaacagaagcgtgagaatcggagccattttcatattcttaaaatacaatcattatgaatccggaggatattaattatgaaaccaatttttgaatctgcaaaacagctggagtcagaacttatatcaatcagaagaacattacatcaatatcctgaaataggttccatcttaccacggacccaatcatttgtttttggcaaactggaagagtatggatattgccctcagaaactatgtgaaagtgctgttaccgccacgatatccggaaaacagccaggcaaaaccatccttcttcgcgcagacatggacgctctgcccattcaggaagcggctcccgtttcttttgcctccgaaaatggctctatgcatgcatgtggacacgatatgcacacagccatgcttttgggagcagctaaattattaaaacaataccagcaggatctggttggtaccgttaaactggtatttcagcctgacgaagaagggttcacaggagcaaaggcaatgctcaaggccggtgttttggaaaatccccatgtagatgcgggcattgcatttcatgttgtttccggcattccatccggaacggttatgtgtggttcaggcacctgcatggcaggatgtaccttatttcagattcatataaaaggcaccggctgccatggcgcaatgccggaaacaggggttgatcccatcaatattgcggcccatgtttatctgtctcttcaggaaatcattgcaagagaaattgcacccacccagccagccgcacttaccattggcaggttttctgccggcgaagctccaaatatcatccctgaagaggtgattctggagggaaccatccgtacaatggattgtaagatatccaaatatatctttgacagaattgaagaaatctccactcagacagcttctctctttcgcgggcaggctagtgtgaaagaaatcgcatctgccccgccactgcaaaatgacagtgagatggtcaaggaacttgccggctacatgaaagaatgctatgatcctcataaaatagtattgtttgcacaaggcggtatgggatcagaggatttcgcgtcttatacttatgagcggccatgctgctatatgttaataggcgccggaactccagaggaaaatccgctatttggcaaacctatgcataatgaccacgttgtatttaatgaagaggttctccccctgggcagtgcactttacgcatccaatgccataaattggctgcaaaaccacgctcaataactttttctttgtatgctgaatatattaataaaaaagggtattcatatgcgtacaaaacgatatacagttgccatagcagggcttatgccggaaatcgtcactcagagcattctgattaaggtttgggaaaaagctgccaaaaaggtatgcgcgagtactggcatatatgtaaatgcatggttaaatgaatcttatttcctttgcggggataaacggggacctgaactagacgggctgactgccaactttataatcatatggaatccagtcgaggtggaaagttatgaagagttccatgaagcttttacacaggttgtaaacggtgtaagggatatattgggcaatccatatgtgtggattacaatagatgacatagagttctattattttgtaaaatgctgagagattcatgaagtcgcctgccaaaataaacaggatgtgggaaattatcgtgtttcataaaatcggggtaggattaacacaaatccgagagtatgaaaaaaagtctgtaaattgagatcttctatgataagttaatgagaaaggtaggtggatgtcgtgaccacctacctttactatacggatgcttttggattctgtcaagatgtattggaaaatcccatcaaattatggtacacttcttacaggaaaacatcaggaggtgtgccatgaagctaaaaacagacgatccctttgtacctgaagatatcagggcaaagatcaatggactgcagtccctgctggatcatgcagccgacttatacagtgatatctatagctggtatgacagtgaactgaaatcctatgacccgaaagccaccgcagacgatgaactgtttgaccctggcacagggactgttgtggaggggatcgattacctgtctatcatggaatccctgtcagagctgcagacagccaacgaatgtaaaatgcagagggattaaccttgtgtcccatcggcctggcctctggcgatgtcttcccgtatcagggccttgatggccccttggacggaagtgtccctgccatatttgtgctgtctgacccaggccaggatatctgcatctgtcttcatattcagttttaacttcacctgtacagtattatagctgtcgtacctgtcctgagcatcgtattttgaaaatccatacatggaaagctcctttccggataggtgtacacctatgcctgtgcgctcttattccggcagtctgccttcgtacataatggacagttccccatagacctgcccccagttgcggatgggcatggtccacttcttcgtcgcctcgaacgtggccaggtacagagcctttaagagcgccgtgctgcccgggaacacgctccgctggcggttgagcttccggtaggtagagttgaggctctcgatcgcgttggtagtatagatcaccttcctgacctccatggaaaacttgaagatgggggataccacatcccagttgtcatgccagcgtttcattgagttggggtactttggcgtccacttttccgtcaccttctccagcgcctccagcgccttttcctcgtttgcggcatggtagatggttttcaggtccgtggcaaatgctttccggtccttgtcggagacgtatttcagcgtgttccgtaccatatgtacgatgcagcgctgctgctccgtcttcgggaatgccgccgttatggcttccttaatgcccgtgagcccgtccgagcagagaatgaggatatccttcacaccgcggttcttcaactcgttcagaacgcagagccagtacttggagctttcattctccccgatctgtatgctcaggacttcctttttaccttccagcgtaaggccgaggatgacataggcggcaagcttgcggattaccccgtcctcccgcacggaataatggattgcgtcgatgtagaccacgggatagacttcctccagcgggcggttctgccagtcttcaatctgcggcagtatcttgtccgtcacgtccgagatgaacccttccgaagcctcaaaaccataaatgtccatcaaggtatccgagatttggcgggttgtcatgccttttgcatacatggatatgatcttctggtcaatgccggaaatgtccttctggcgctttcttaccacctggggttcaaacgtggacttcctgtcctggggcacctggatgtccatgctcccgaagctgctgttgatccgcttgggcttgtagccattgcggtaatcatccgaatccgaccgttctgacctcccatagccgagatgctcatccatctccgcttccatcatctccttcagggtgctccccagcaggtctttgagggcttcctggatatcctccgcagtctggatgtcatactcttccaggagctgatggacgatgttccttttcccctccgtcatgactactttgtgtacgggctgtttttctcttcttgccataataataggcctccttatgataatagattttatcatagaagacctaatgcttaatagctatttacagaaaaactttcatactctcacaaatcctgccccaaactcagcaaagaggctaaaggttctcttcctcaagcccgccttcctccttatattgtcaagtgattttccttacctgttctgtatgaatccctaacggcaccttacggcggacgttttcccgtctcgttcttcacacctctaagccttcttgtcacggctggattcagctcccgacaccgtttgccggaggctcagtccaaccgtgacagggtattgcccgtttttcttcctgctgttatgccgtctgtacctgcggcctcctgatgtcacccaacagtttcccgggggcataccggatacctttggtaaggatcgcgtaaaatatcctcaacaccttacaggctaccgccaccaccgactgcatctctttgagtgggttctccttccgcgtccggtaatactcgtgtatctcccgaaactctgcgttctttcccaccagcgatatcgcggcctcgtacagcacatacctcaggcgcttccgtccccggtaactgatacggctttccccgttgtgcttgcccgaatcatttgccactatggcatatcccgccagcttctgcagctgtttggggctgtcaaaacgtcctatgtcccccacctctgctataaagccgctgaccgtcaccatcccgatccccttgattgccagcaggttatctatatatgggatccctttcagcttttcttctattctctggagtagttcctccagccttgacgcatacacatccatatcgttcagcaggtttttaagctccatccgggcagcttcgggtgcctccttgctccccacgctgtgctccgcagccgttaccagggtctttgccctcttcattccggcgcccctcagctttgcgtccctccagagctggttcactccttccgtccccagctttatgatgtcctccggcagcggcgcttccttcagccccagcctcccacccaccgcctttatgtctccgtaaacgtctttatattcaggaaagtagatggaaaaccatctcgccaggctgttctttatccttgtgagctcctcctgcgtctggaagcgcaggttcgataagctcctgatctccgcgtaaatgccgaccggcatgtaagggtaagagaacctcccctcattgacaagcgcagcgatcgtcttgggatccttgcggtcgttcttgttgggattgttgtcatccagttccttcgacttctgccttaaatgtctggaaaccggtttcggtgttgctgaactccaacggtttctttgtgtactcgtagttgcgccagtcaaatgctctggcatagtgggtctcacttcccacatcaattccgacaatcaaagttttttcagttatggatgcaatttttgcgttttgtgtgttacaattcatctttttatcaatcacccttcttggaattccctatgtttgtattatacaggaagctccttattatacaaaaacagggaaccagagcactcctattacggttataagtacaagaacaggtgaaacgctgtaccggggatattttaattttgccaatcaatctgcttataccgtgtcagtcgtctccgagtctttgccttgtacaaacaacaattcgattataatgactaatctccttctctgcagattttaccgttagaaagcgatctgatatattaattaaaagggaaccatataattcaggtcatgtatgcgcaagaggctcagagacaatgagtgtgtttcgctgatacccaataaaaaagtatcaaggaaccttcagactgggcagtcggcaagcgcaatgtaacagcctttgatccgtccggaggtctgttactacttccacgactcgttggcttcgcagctccagacccatttgggagcaaaggttctcatttgcttttttcttcaactagaacacacgactttcacccattaaaaacgtgaaccgccgggcgcacttttaaaaaaaccctggtctaacatagcttaatgggttgaaaacataaattgcatcatgcgcatcaactctaacgcacttctgaaactcacctctttatcacctgtaagtcttcccttgatagttccctgaatgctggaattctgtctgtatctaacgattacaaccaatacagccctggattttagcgcctgtgggaatggagtcaccccataacggcctatccccttatcttctaccatttccgaatgttctttgctggcatccagatatctctgttccatttctgaattcataaaacgaggattcgttgtcctctgtggcgttcccaaccaatcacaaatctcatctatttttagtaccatatctccaatatcagaaaacggaatcgtttttttaagatgataactgcagatttccccacgaattctatcctctgttttaccctgtatacaaattagcatcatactactccatccggcattatctatattctcagcacacttcataacatcatcttccagattcatcacataactccttccactctttataatttaatatccttttatatctgcatctatctctccagcagtaatattaataagaaaccgtggactctggcgctaatatctccgctacctcatctgagccatagctgagaatccttccgcctgatccaagaacccatttctggtcattcccgtctgttaccttcgtattcttcatgattttcccgctggaattaaccagcctttttccttctcccggtatgtcaaatacttcatatctggctgaggaatccgctttctggagccttcccttatagtaaaatgccccatccttgatgccggtgattccttttcccttaaggtcaaaataatactgggaacgggcggctcctattccgtcattcagcatggtcctgccggtgatacatttcctgttcccgtccgggcctttgcaataatagaaatccccgtttacctctatgaggccgtactgcgccaccccatacatgtcaaagacataatagctgtcttggattttctcaacggcatagctgttttcattaccgcatttcggttttcctgattggtcgaaatagtaccattccttttgcccggaactgttaaggtccgcaggtccgtctattttcagccatgtcccttctgcccgttccccccggatgaatgtcttatcctgttctgattccggctggcagaagtagcggtagccttttatctctggcgttgttgagctgatttttacccagcccgggtacatgatgccgttaccatcaaaacaataggtgactccgtctaccttaacttcctttttcccccctgtggaacgcttcttttttcctgaagatttattgaaatagaaataagcatactgtccattctcctgtacataatccaccacatccgagttatccatccagctttggggaatctccagccactgccatcctgttaccctggctccatcttgtccacagtaataataggaatcctcatcctcctcatcatcggctgattccgtcagccagccggtgcgcatcacacctgaagtattaaaacaataatactgcccatcaattttataccagccgtccatgcgcacgtatccgtccctgcctgcataataccagttattgtagtctgagttcctggaatccaggccgctgataacaaaccactggttctgatataaatatccctcatccccaatgtaccgtctcttgccgttttcctcagtcagccaccgtttccggtaattcaggccatttttatcaaaatagtatttcttatcctcaagttccctaaagcctcctttaagcacagctccagattctgccgcataataccaattctcagtcacagcacccgtagtggtattggtagattcaatcttaaaccatccatcatcctgaagaacgccatccttatccaggtaatacctatccccatctccgtctatgtaccagcgatttctatagttaaggccgttggcatcaaagaaataccactttccattctcttccctccatccattgcgccataatacaccgttggcatccgcgtgataccaattggtatactgctgtccgctgccattggtacctgtaatggagaaccagccgctttgtctggccccgttcccgtccacataataccggtcatcatttaggctgaaccatctgtcgcggtaaactgtcccgttagcatcaaaataacatatcatgccttccagttcatgccacccatccctaagaagggaaccatcctcattaacataataccaattagtatagggctcccccttactattcacattgtcaatagaaaaccagcctggagccatccttgcaccattctcatccacataataccgcttatcatccagattaaagaaagactttctgggtgagtttccccctgggtaaaaataataatatcttccccccacctcatgccagccatctttcaatatacttccgtctgctcctgcataataccagttggttactggcttggctgaaggtaatgcagggctagacatgatattgaaccactggtcttcatatctggcaccatcctctttaacacggtaacgcttatctccaaaattcacccaattatctttgactatctttccgtctcctcccacataccttagggtcccgtctatccatgtaatccactggttaactaattttttgtcattttccttgtaaatccattcctgggccgcatcctgctgccatccatccaaggcaaatgcagaaacagatggaattgccatgaatacagctgtgcagataacatatagatacaatttttttctcatcataatgtaattactccttaatgaaaattactccgcagaaattttccacaggcaccttgccgttttcccctgtactgttttagggaggaggcgaattttcaaacatccctgacataaatcagattaatctctcttacagggaatgttttttattatataattcatataccacgtttaaatatggaaccaccccagatgcccaccaatattccggcatgtattttcccgtataggcagtaatgtatgtcctgttttctttcatgaattcatagtaatcacaggtaaacagtcctgtgttgaccgagtataccccgggcctgtgaatcagcagttcttcacatccatgctcccttaaaatctggcgcagcctgtacccaatgaccctgatattattttttgccgttctttccggcgtatcactgtataaggtatacgctatctcggaaagcggtacgctgcatcctcttttactgaccaggagggccaatagttccttagactttttgctggaaaaatagactgcctgattggcgatgaacacatcaaaaccgcaaaaggtctgtatgaaaatatgactgtctgctgacatgactgtcttccctcctatcttatatcaagtcttctgttacccgctactccacggtcactgattttgccagattccttggtttatccacgtccagtcccttggaaagggatacataataggccagaagctgaagagggatgacaaccaggctgggataaaaacattccaatgtcttcggaacgtatatggtacagtcagccgtgtcctccatgcagtaattcccgtaactggtaatccccaggatatttgctcctctgcttttgacctccaccatgttgctgattagcttttcaaacaggctgccctgtgtcgctatgttgatggtccatatgccgtcctcaatcagggaaatagtcccgtgcttcagttccccggcagcatacgcctctgagtgtatataggatatttccttgagttttagggagccctccatggaggcagcataatccagtcctctgccgataaagaatacatcattgttatgggaaaacttattggcaaaccactgaatccgctctttttcctccagaatccggctgattttatcaggaagaagcaaaagctcctcaatcataccttgatatgttccgtcatccaaatttcctctcacccggccaaagtggatggccagcagatagaccgctgccagctgggcgctgtaggccttagttgtggccaccgcaatctcaggtcctgcccaggtataaaacacataatccgcctccctggcaatggagcttcccaccacattaacaatacccatgaccggaagcccctggctcttgacctccctcaatgccgccagtgtatccgctgtctcgcctgactggctcaccacaatggcaagggtatggtcctcaaatacagggttcctgtaacgcagttcactagccagatccacatccacaggtatccgcgctaactgctcgaaaatgtattttgcactcatgcacacatgataggcggagccgcatgcaaccatctggattctctttaaaccgcatatttcctcgtcagccagctttaattcatccagcacgatttgtttatcttttattctggggttcagggtatcccgcactgcctttggctgttcatagatttccttcagcatgaaatgctcaaaccccttcttctccgccgcttccatgtcccagtctatacgggaaaattccggttccagctcatcctggtcaatgttatataaccggatgccatcctttgttatgctgaggatttccatgtttttgacaaaacagatctcccgggtatacttaaggatggccggcacatcagacgcaatgaaattaccgcagtccgaacgtcctgcaattaacgggctgtctttgcgcacagcatatatctctcccggcctgtccttaaacaggatgcccagggcataggagccgcggatccgtaccatcattttggttatggcctcaatggggtttccgttataatatttatccaggagatgggccagaacctctgtatcggtctgggaaatgaattccacacttctttttagcagcttatcttttatttcctgaaaattttctatgattccgttatgtactaccgcaactcttttatccccagcgcagtgtggatgtgaattggccaccgaaggttccccatgggtggcccatctagtatggccgataccacaggtaccggccactgcccttccattgtccgtcatttcacacaaaacctttaaacggccttttgccttaaccacttccagggttcctgttccatccactgtctggccctgtgaccggtccgccaccgcgattccggctgaatcatagcctctgtattcaagtcttgccaggccgtccaacagaatggaggctgcctgcagatttcctgcatatcccacaatcccgcacatgctacagtacctcctgatggcctttggatatgatggcctctataatccggtcaacgaattcccggcatctggccggttccgctgcctccaccatcacccgcatgacaggctctgtcccgctctcccttacaaggatgcggccatccttacccagcgccgcttccacctggccaatggcatcctgtacgtccttatcctccctggccgccttcttatcctttacccggatgttttccaggacctgcgggtagatatgcaccggctctgctaacttgctgagaggctgctttttctccaggatgacctccatcatcttgatggccgtgaggattccgtcccccgtggtggcatatttgcggaagatgatatggccggattgttcgccgccaatgcggtagccgttggaagccatgttctcgtatacgtatttatcccccaccgctgtcttctcatattcaattccggcctcgtccagggctttgtacaggccgaagttggacatgaccgtggtgacaatcttattgccctggagttttccccgctccttcatatagcgtccatatatgtagaggataaggtccccatccactaaattgcccttttcatccacacacaggcagcggtccgcatccccgtcaaatgcaaaccctacatccagcttcttttccttgacaaaccgtataagtccgtccatgtgggtggaaccgcagtctgtattgatattcaggccgtccggctcattgttaatcacataggcggatgctcccagggcgtcgaacacgcttttggcaatcatccaggcgcttccgttggcacagtccaggccgaccctcatgttcttgtaggaacgggttgccagggaaataaggtaacccgtatagcggttcctgcctgccgcatggtccacggtacgcccaatctgttccctgaccgcaagcgggatttcacctgagatgccatcgatgtaggcttctatcttcaggatggtatcctcgtccattttttccccctgggcgttgattaatttaatgccattatcatagtagggattgtggctggccgatatcatgacgccgcagtcaaagccttcggtgcgggccacataggaaacgcttggggtggtggtcacatgaagaagataggcgtccgcgccggatgccgtaagcccggcggccagggaatattcaaacatgtatgaagaacgccgggtgtcttttccaatgacaacccggcatttcccgtcttttttatttctgctgtaataccagcctaggaaccggccgattttatacgcgtgctctactgttagtgtcttgttggcttcgccgcggaagccgtcggtgccgaagtattttgacatgactttctccttgcgctaagtataggtatataatattaacttcttatggagttatttcctccatacaactttatcaactattccagtataactttgaatcagctttacaaccttggtactaacattttcatctatatagtttggaacaaccaggccattatctccgttctttaccatttctacagctgtctctactgcctgcagcacttgatttgccgtgattcccgcaaggataaaattacctttgtccaatgcttcgggtctttcggtgctggtacggatacatacagccgcaaatgcatttcctatagaactaaagaaactgctctcttcaggcagtgttcctgaatctgaaatgactgcaaatgcattcatctgaagtttgttataatcatgaaagcccaatggttcatgggtatgaacccttgaatccaatgcaaaccctctttctgttataaacttcctacttcgtggatgcatggaatataaaattggcatgtcatacttttctgccagtgcattaaccgcggagaaaagactaatgaaattttcttcattatcaatattctcctccctatgggcagaaagaagcatgtaattacccgctggaagtgacaggcgttccattacattgctcttttctatcttttccagattgtcatgaagtacttcagccatgggactgccggtcacatatgtcctttcttttgctgtcccctcataattcagatatcttcttgcatgttcactgtaacacatattcacatcagctatatggtctacaatcctacggttggtttcctcaggcaggcattcatcgaaacaacggttccccgcttccatatggaagataggaatatgaagacgttttgctgaaattgcagacaagcagctgtttgtatcacctaatatcaatagtgcatccggctttatatctgccattatcctgtatgacttcgctatgatattaccaatcgtttcacccaaatcatttccggctgcattcagataataatccggctccctaatgcctaattcatcgaaaaatatctgatttagacaataatcgtaattctgtcctgtatgtacaagaatctgttcaaaatatatatcgcatttttttataaccgctgacaatcgtatgatttcaggtcttgtcccgacaactgtcattaatcttaatttacccatgcacatccccctctaccttcaagtaatatgtatccggtttttccggattaaaacactcattgcaccacataatggttaccaggtctgcgctgccttcatttatgatattatgcgtgtatccaacagggatatcaaccacctccaatctatcaccggaaacatgatattcaattacatgctctgaatcaatccggcgaaactgaatcagcgcttttccactaactgctacaaatttctcattttttgaatgatgccagtgatttccttttgtgactccgggttttactatattcactgatatctgccctctgtcctgtgtccggataaattctgtaaacgatccgcgttcgtctatattcatttttaaagggtagctgaactcattctcaggaagatagctcaaatacgtgctgtatagtttctttataaatccttcctctgtcatatccggaatgcttttattctgtctactgtcgtggaaggaatagagtagttcagcaatcatccccagattaacactatatgtcaccggaacaaaacagaatttccggtcagaataagatgggtaccctgacaaggcgcgcagcaactcttctgtcacatcatctatatatacaagatttagatttacagatggatcatttacctggataggaagtccatgtgtaatattgtgacagaacgtggcgattacactattgtaattcggacgacaccatttgccaaatacgtttgtgaaacgatatacataaaccttcgctccggttttcattccatgcctaaaaaacaaatcttctcctgcccttttgctctttccataaggattatccaattccgcctgtatggaagatgacagcataaccggacaggtattgtcatatttctctaaacgatacagcaagtcttctgaaaagccaaagtttccacgcataaaatcttccgttttttccggtcggttcacccccgccaaatggtatacaaaatcagcttctttgcaatatagttctaacaattcaggatttgtatccacatcatactcaaatatattaaaattaggattgattttaaaggacttatccttgccatctcgaatattatttaacgtggctatcaggtttttaccaataaatcctttagctccagtaacaagaatgttcatattccactccttccttctaatatttttatttattttcccaacctaaaatctcttcacggatgtattgtaatgtaagaagtttttccttaacctgcgtcaaagtaaggagatctgtattattagaattgaattcccttaatgaactacgccctatatccccgtctttgaaatatttgtcataatttaaatcccgtttgtcgcagggaacgcaataaaaatctcccatgtcaatggcatgggagcattcttcattggtcagaagagtctcatacattttctctccatgacgaataccaatcacttttattttattgtccgcatgaaacagttcctttactgcctgtgcaagaacctcgatggtacaagccggcgccttctgcaccatgatatctcctgaattaccgtgccggaaagcaaataccactaattccactgcttcttccaaactcataataaaccgggtcatggaaggttctgtaacggtcaaatctttcccgtcctttatttggctaatgaacaaagggataacggagccgcgggaacacattacattgccatatcgtgtgcaacagatgcttgtacaatccgaggatatggttcttgactttgcaacgattaccttttccatcatagcctttgatgttcccattgcattcacaggataagctgctttatcagtggatagacagataactttcttcacgccagattcaatcgccgcagtcagcacattttcagttcccatgacatttgtttttacagcctctatagggaaaaattcacatgacggaacctgctttagagctgccgcatgaaatataaagtccaccccatgcacggcgtttcggatactttggatatctctcacatcgcctatgtaaaactttattttgtcgctgtattcaggaaattccttttggtaaaaatgacgcatatcatcctgctttaattcatcccgggaaaatatacgtatttccttaatggctgattttaggaaacgctttaacacagcattaccaaaagaacctgtaccgcctgttattaaaagcgttctatcataaaataaatccatatttgctaatcccttctatcttttgttttatataatagtatttcccacaatttacctgataaatatgtatcgacacaatgcattcccacagataaagcaaacgtcaatccactaaaaaccaggacaatatgaatcattggcatgcccgtattatagatatttattgtatagccatgaattaggtatatttcatatgataaaatgccaacccacaaaaagtatctgtaattaatccatctatttgtacaaaacacaaagcagataatcgccaacgctgctggtaactttatcataagttgaatgaaactataaatgacctgaggggattcccgtatgattgccgtttgtttacatgccaaaaaaccaattgcaatcaataggagcaccataccatttttccattgtatctttcccttccagtcatgcacagcaaacatcacccctgcaataaaagaaaatgactgctccgcgcgaatttccctgcttatgaaaaataggataataccggttaaggtgagaaaaaaggttctattccttttcaaaaaaacccatcgatggataatccaaaacataaaataccatatcatcaaataattcagataccatccaaaaggatgggacggcttaataagcaagatgtccagcggatgcaatcccgaggtaaaaacctgaataagcacatacggcagccaaactcccaccaatcgctttgtccaataatgttgaagcccattcttttcatctgatttggtcagcccgtatcctgagataaaaaggaacaatgcaactccaattcccccacatggcgtaaaaatacgagtataatgaccacctaaatgactgaatagtattaataaaattgcaattcccttcaggaccaatgttccatttttatctaaaaaagtaagcccatccccccccccccatattttcaacacccacccatgatacaatcagtacaactaaccatggaattatcactattatcatctcatataaaaacagatatctcattttccccctctaattctccggattattccttatcagccatatccctctatacatcagatatcctgatacggttccgcacgtattatggaaaatatcatctaattccagtatccccagtcttgcaaaatattgtataagttcgattgaaacagagagtatcattccgcaatagaatactatatatagttttgataattgcggaaaagacaacggtatcagcagccccaaaggaacaaataacaaaatattgccaatgatgtctccccaatatctgaactttcctatctgcagcgcaagacgcaggcaccagaaaaactccaggttttttcttggttcggcttgaacctgtctccctattaaggtcgcacttaaaatgataaatatccaaaataacgtgccgcttaaccaccatctttcatatttctttaaaataaacttattatgattcatgatatttggtatcaataagcagacagcaaatgccattatcataatcgtaggagaaacattgcggaatggattccaatcactccaaatcattttcctgtattcccttaacatagaagttcttataccattttgcaaattttttcatcccatccctaagatctgtcttaggctggaaattaaaatccctttttatctctgttatatctgcgtaggttacttccacgtcccctggctgcattcctactaactccatatgtgcctccagatcataatccgcaggaagaagctgctcgcattttaatgcatgttccaaaatatgcacgaattccaaaagattctccggcgaattatttccgatattatatattttacatggcaccccattttcacttcgtttagggatgcgccgcaacaccgcctctactccattgactatatcgtcaatatatgtaaaatcccgtttgcagttcccatggttaaaaatctttattgtttcgcctttcatcattttatttgtaaaatcaaaataggccatatccggccggccagccggcccatatacagtaaaaaaacgcagtccagtagaaggaagcccgtacagtgctgcatatgtatatgccaaaagttcatttgattttttagtggcagcatataaagaaaccggataatcagtcttatcatttacggaatatggaatctttttattacttccatataccgatgaagaacttgcataaaccagatgctctacaccgcccttttgtttatcttggctatgtctacaggcttccagtatatgataaaaaccaatcagatttgacttgatatatgcatcaggatttataatactatagcgtactcctgcctgtgccgctaaattcacaacaatatccggacagtattgctgaaataaaccaaacacagtttctttctccgcgatatctccttttatgaatgtaaatgttcctgacgattttccggcctctaatatgatttgctttaaccgatattcctttaatgatacatcataataatcattcaggttatcaatgccaataatctgtatataatccacagtcctcaataagctgacagccagattagccccaataaacccagcggctcctgtaatcagcacttttttatgttccagacttacatttttatcaatcatcgctgccaccttctaccttccgatactgtaatattctacaccggataatttcatctcatttgtcttaaaaagatttcggccatcatatataagaggcgtatgcattaaattcttaaagcattgagctgtcaacctttttatttccggccattcagtaaacagaaagcagatattcgctcctttcagtgcatcttccggcgaccgtacatatctgattgtcccattcattatacttccttccgggtaaagtctcctaaagttcatctctcccacaggatcataggcaacaatatttgcccccgcctctaaaagcagaggaacattgtccaacgatggggcctcccttaaatcatctgttcctggtttgaatgtaagccctaaaacagctactttcaatccactaaaggtaatcaaacggtccgatgccttccttatcagctttgttttttgttcttcattgacagccacagctgcttcaactgtccgcagacgatatccattttgggcagccaggtattttaatgctttcgtatctttagggaaacaggaacctccatagccaattccggcattgagaaaaagattcccaattcgtttgtcataggacatacctttggcaacctcctcaatatctgccccaaccaattcgcataaattagctatatcattcatataagatatttttaaagcgagaaagtcattggatgcatattttatcatctccgctgaccggcgctttactgatacaatcggtatatcgaaatccctgtagatttctcttaaccgttcttccgcccacggcgtttctgttccaataacaatacgcgatgcttttaatgtatcccttacagcggttccctgcgccagaaattccggattggatgccacctccaccttcacatcgtggaccagaaagtctcttataaactgctctactttatcatttgttccaatcggcactgttgattttactactaccaggcaatccttctctatggattcggctatctgccttgatactgttgctatataagaaagatttgctgaaccgttaggcagttccggggttcccacacctataaaaatagcatctgcgtttgaatatgcagatgcatagtccgtagtataatgcaaacgtccttttgcatgattccgtttcatcatttcttctaaatcagtttcataaatcggcgacttccctgactccattaattctacttttttcttatccacatccacacagataacatcatgccctttttctgcaaaacatactcctgccacaaggccaacatagcctgttcctgcaaccgaaatcctcatcctcaaaccagtatgatatgctcagacaccatatacatacaatcctttcttaattttatcttctatagaataatagaaagcctaatcagtataattctctttaatccattcctttgcaatatataaatcaatttcatgatggatatctattgactcatcaattacatacggcaggattttatcacccataaatccccatggctgctgcccatctcttcctgaacacaaaaattccacatttaaaacccagaaattatgtgccaggaaataacatactggcaaatcctgcctgttagttgaaactttcccttctatcccctgctcatacatactgagggttccatcttccattaatctttttgccctcaacggatgatggtcattatctatgtaggtcggaacaacagcggtaacatcaggattgtcctccatcatttttatgcagtcatcaatccactgggatttgatggttacgttattagccaggataaccactaatatttccggcagttttcccttctgtttcatgatatcaagcgcatgcatgatacagtcaacgtgttgtgatgtgggtagcgcaagttcttttggccttacaatggattcatatccttcgtcaccggctgcctttagaatcttttcatcatcactactacaatatttatcctgtatatacctgctttttgctcctgcgtgcgctggataataaagtaccggtttccctaaaatgtcaagcacattcttatcctttaacgtattatttcctcttcccgtcaataatgctgttgttttcatcatttcctcctttgaattcaggtattttataagcagataatacctatttttttataaaaatcagaaacctgacaatccccatcaactaaacgaatgagagagactgtctcaaatcccattttttttgccgtctgcagacctgtactttttatgccaataacccttaactgtttacctgacgcacatgataaatatccttccatggatatggatcgttccagttccacttcattgcagaatatatcaagaacctctgtctcccgtggatgatacttgtaatatacattcaatccattttcatgcgcattctggatttccctttctagcgccagttcaacatccctccttttatctccatatacatgcaataaatccaatacaaacagaatccctttatcataaaagggattcttcatattaaaatatattttttttattcccgcttcaaatgcctcatccggtatctcagtcagttccatggatttgtattgttcctgtacatactgtggataagaaacatatgcatgctttaataggcagtgccctcccatgtaataatttaaatcataatacttattcaaacagaatatatacttaaagataatcctgcggatcatacgtgtcatccggttagcccccattcccccagatacaactccattagaaaaatatgccgttgaaccatcttccagccatataaattctgtctcctcattcactcttcctgagtatttcataatgtacatttccggaatgcacatatcctccacaagtatgaccctatcatagtcattttttataaattgctttaatttatgatttatgcccgggtaacgtcttattttattccaatattgttcatttattttgggataggctcctgtcagaaacaatatttcctgataagaggatgtgagggaatccctaaccatatcagaaatgttaaaatcctgaaataaaattaaatgatttgtatccttggcaaatactgtatgagccaggccagtgcccaatattaaattatactgtgtgtgcaatacaaataaatttctcattttcatcctttttcgttattattctgttattttaatatgcggctttttaaatattttttgaccagacagaatatttcaaaaaacaatggatctttttttatgaacaggatagtacaatataccgcgcagcctacgaaaatctgctctaatgtaacaatagggccaggactttggatatgcccccacaaaaagaccacaataaacataacaagggaatacaaaaaatatctcgctgactgattaaatatgtttattatccccacctgtctgttcaaatagtaaaactgaattcctactagcgtataattagaaaacaatgtagcaattgcagcacctatatatccgtaacgtggaattaggattgtattaaccgctatattcaagactgcgcccgcagcatttgatttcagcaggattcccatctgattggtggcggtaaaatactgtgaaccggatatccctataagtgtattactgattaccatgggtgataaaataacaaccgctttagcagtagccataaacgccctgcccaaataccacggtatgaatttgtatgcaattcccatcagcccaaacatcataggcaaggcaagaaacatggaatagcctgccgctttttcaagtaatccgccgataaccgtttgatttcccctcttaaattcatttgcaatacggggcatcattacggtgctcagcacagtgatgaaagtcagcggaataatcacaatcttctcagcctggtcatagtaagatatctggcttgtcccattagtcagccatccaatcataactttatcaacctgtaaataaatagtagctacaaaagagggaagaaataattcaacagaaccccataaatactttttgaaattcttaaactgtatcttttttacctttatatattttctgagctgcaggtacgccaatatgttagcaatcatcgttgacaatgaaagcagaaagatatatctgcctatatcctgttctgacttcacgaacaaaaaaatacataatgtgctgagaatttttgcaaacatattttttaaagccgggattttcatatcttccaaaccgacaaaaagccacgtacagtcaaacacatttgccaggtaatagatataaaataaccgaaagaaaatcgcgaatcccgatattcttgcatacactatgtacacaattgttccaaagattcccaaaacagcccttagtcccattatatcccaaaacatttgggacatttcttcaccgtcatcccgcatataggcggtctgtctgttcccataggaataaataccaaatagtgaaactgacataataaccgatgtggaggaggatacatagctgtatatccccaagcgttccgcgcccaaaactcttgccagatacggcgcagtaatcagcggaaccaacaagacaaacatgttatataaaatattatagaaataatttttcaaaatcctgctcatatactgtcatacctgctatgcttatattccttacttcttggaacaatcatctttaagagccagattggaccaaacataaagacaatgtcaattgcccatgaactaatgcttcccctgcatacaaactggaatagatatccgaacatgatgctgtaggaaatcagctgtaaacggtcaccggtcttaagcatcctgtaatataacttcctggtaatatacccaaaaataaacatacctacaatcgttcccaaaatgccaaactcataataaaactcaccaaggttaggatatgcggaaccgccgaatgaacttccgtacattgcttcaaaggctgtttttcctaaggtggcaggtttattttcccatatggcatgtgggataaactgaatcagtatattcaggaaacccaatccccaatgatagtgtatctctttgggaatcattcctgtcagattatagaaagggaaaaatatttccacattatacatgaacgctttcatcatggcatcaaagtctacaacagataaatcaatccgggtccccgccctcatggtttgtctgaaaatgccaattatacagaccccaacaaacaaaaaaaagagtcccagtaaaacagttcttttacggggccgtgttccggtactaacgtaatgataaataacaggtgatagtataaccaatatggctgtatttctggaaccgctgctaagagaaatcagtgcaactactgaaaagcacagatatgtggagacacggccctgctttctataagcaaatagaagtaaaatagcggggaccgcacttcgcaggaaacagctcaaaaaaagcaggcttgtatttttatatgttaccggttcatccgcgccaaactggccaaaactaagcatcatcatgattgagcgtccggtcagcctaaaataggtcaaactgcaaaacaggctgaatatcagcaataccagcgcatatcttaatatgaatactttggcctgttcatcttcatccaataatgcggtttccgccctacgcctgttttttttacaaaaaaagcctcctaggacataggaaatatagccgattataaatactgtatttcctctgggaagatactccattacctctacaccctgataatcggtctgaccgattttaatccattcgcacggcgcccagacaaacaccaaaaaataaagacctgtaattaaataaaacgggtccataacatcgaatcttcgggctgcgattatatgtgcggacacggatacgcctaaaatgacggatgtgataaaaagacacagtacattaaccattcttatatttcctttgaatcatttcaataactgcccggtttacattatcttcatatttttcccatgaataatttctgccagtttccattgcagcgcgtttcatgtccttcatcctgtcccggtgctccgtaaaccagacaatccggtcccttagctctccagcatctccggtctccacgacaaagccatttactccgtcttgaatcaggtcggcaacccctgagttagcggagcagataacgggtaagcccgatgccattgcttccagggcagccaggccaaaaccatcacatagtgagggaaatacaaaaacatccgcatctttatatcgattggcaactgtttccggaagcagatatccaagatattctatattggaggcatttttatgctgtaatctgtccggtatcatgcaatcccctactatttccaaatgtgctgactccggatttaccgtctcaaaagcttccaataaatatgagattcctttcatttgccgtactgctcccacaaagagaaatcggaccgctccattgttttccctcatggaaggggcatagattccggaatcaacaccataaggaaccacccacacatcgctgccgtttcgtccgctatattcgatggagtgttttactacattagacgccgccaggaaaaagtgggcattttttatttcttcctcgtaatcttccagggaatagtcccacaaaaagcgcttctcacaccgcaaaatttcagcccattggggattcttctccatatcttcttcatatacatgtttcacaaatgagcgattggccgccgacatatccataatacgtacaatctccggagccgcctgctttaaacgttcaaaacaggatttggcgtttgtgtcatacatgatgactgcatccgccttcattttcacagcatattcagctactttccgcccaaaggaatcagccaccttcttattccaccaataatagattctgcggctatggtccactcgatttaacaaaagcaaaatcaggcctgataaaatgttatattgtattagctgtttatcatctattttgtcgcatcgtcgtctttccagacgttttttattttcctcattaatgaatagccgcagaagtttaacaacgggcccattctttttattataaacagtagtcatgtaagtgaagaggcatccataacgattaagtgccgcggccagcctataagaatgctgctgccccgggtgggcaacgataattcgatatttatccatactgtttttctcccaagtactgtaatttcttataaaacatatcccttctggcggctagtgcatcatattcataagaggcggctttatcaagattctgtctgcttaatttctgatacagactgggattagtcagtatatcccatgccttttttgcaaatgcctcatcatcctgttgactaaacagacattccgccggtaaaagttccggtattccgtttacaggtgtggataaacagggtaaccctacagccattgcctcgatgacggttctgggaagaccttccccttttgtcggaaaaacaagtaaatctgaccccaataattcttgtctgatagcctgtgaaccagagagaaggcctgtgaactcaatataatcggctacttcataagataacgccatcttctcaaattcagatctcatgggtccatctccgataaactttacatatacgttcatcccattcttccgcaaaatatttagtacgcgtattactacatcatgtcctttggaatagtccgtaatgcagctattaatatggacaattgtatattgattatgaggaaccgcacggtcgtaataaaagaaatctttatttaatatgattgaagaataaaagctttcaaaatgcatatggttttctttgtgccgttttacataagacgggtacctcttctgcagagcagaacgtgttacataggagacaccatccgcattacctgccataaatttaacctgccagtagaaataaattcttacaaatggtctggatagccccttatatgctcccggagcaaacgtatcccatgggtcatttacaacctcaaccgcccaaggaaggtgtttcttttttacctcattatggacagcattggcaatcggacttggaatgcggtaaagagcacaactacagccatctgcaattccaaccattgcttttcttattttccaataacgtaatacaaactctttaggtccccgataatgtggcaattgaaaaaactccacattaggcccgctggaaatcatcatatcttcgttaaggcttgacacatcactaattctacaggcaatccgcacttcatcaaaaacctttagatagcgtttccaaaagtcatatccataaatagtctttacccaaaccttaccatcgggagtacgtataaattgatgatcaactgtaaccaataattttcccatgtccccatcacccttatccctctcgtaactgtgctaaaaatttttttgtctcattgatacaggcaaaagagttctgtgcaattgcaacggattccctaccggcattacttacccactcttccgatgcatttagtaaaaaatatatgcacgcctgaacttcctccgtatccaggatgtcaaatacaacaccatttttatacggttgtattaattccgggctattccctgtatatatagatacacacaagggtaaacctgcaaatgccgcctcaattgcggacagtggattgcagtcctgtaatgatggaagaaagaaaaaatcagataacgcataaaattctatcaccgtgtcttgattacaataccccataaaatgcacatccaagttttccttgtccgcaatatcctgaagttcctttttcataggtccttcccctgctaataaaaaacaggcattggatatacctttaactttacccgcgcttttcaaaaataaatccaatcctttgagtttaagcagtcttgcaggacaaaaaaacacccttttctttgcgggaataccatattttaaccttaattcatatgtatctttccgttttgatatggcatgttggtaagatacatcatcaaccaaattgggaagtctgagtctttgtccatggtttcctacaaaatggtccattgcttcctctgcataaatcccgggcaggcaatatccatcgaacttcatatataaatatttcttaaaagcagaaacacatttatttgatgatttagctttcattgctctccgttcatgtgattcaacccagaagaagtaacggacattgttatttcttctgccgcataaaagtttccacaccgttggataagtccatgaacctgctattataacaatatccggaagaaatctttttatttccctggttatagatggattatatatgaaatccattccacgtatcaggattttcttacctggtattagttgtgtaaagctttcctttaagtcttcatatgtccaaggccgtaaaggtagttcatctgtcatcacatatacacgtaattctccattcatgaatcttaactgagtatttaattcgttataaaaccgcattctatatggagtcagaatatttgttaaaattgcaagcctcataaatctcctcttagaatcttactatttctttgtattttctgatatttaccgaaggccgaaaaaactccatgaatccattgttatattcagatgatggctgcattgacaactcgcagattagatttgccaattcgttaacatcatatccagtaattctgataggaatattccgatgtctgaatttatgctcaaaagatgtatttttaccaaaacagaatataaccggccttccacaagaaagcactattccagttttgctgggcatggctgttttaattcctccaggtactaacggaatgatattcacaccggccgcagaataaatatgggttgctaattcactaggctgcattggaaacatcgtaacatttgtaagttgataagtacgtatccgctgctcaatcgcctcccggttcaccccgtctccaataattaaaaagtggatttttttattgccctttagtttaccggctgtttctactatcatttccacattctgcattttcccaatatttccagcatataccgcataaaacacatctggagccaacccatatttctttacaaattcatttttatcccaggaaatacttacagtagaatctgagtatccccaattataaataacttcaatctttttttcgtctacacctttatccacgatgaacgatttcatatcatctgaaatacatataatcctatcggactttctatacacatatagctgccatgcctcgaagtacttgtataaaattgatttctcctttatcaatccgctttgaaccgcattgtcaggccacacatcctgaagcattgcaacaacatgcagtcctttactttttgctgccaatatgggccagaaggaggaataggagacatcttcaaacaaaacatctcctcccttgattcttaaaataccaatagcttccctgatatttgtcagtgtatcccgtatatatcttgagatgatattggcatgtctgctgctctttcttttatacaaatgatattcaatgtcattccctatataaccatatttaaaagctgtatcctctttatcttcacacgcaaccagacgcacaatagaattaccatcttccaggaatgccccaatcaaatcctgcaatagatgattaaaggggcttgtccggtcatatacaaccggtgttgccattactatcttcacagcctctcatcccttatccattttaaccgacttgaaatttcaccatatcaactgcctttttacaggctctaactgcactttcggcattatctgattgtgctatcacaaaaccaacacggtctacactattgtgaatttcatgagccgtgtatcctaccccgtgaacaatgcttatctgttgtattccatctatcttttcagcatcagggataccgatgatattatgtattacgccttttggtgaatcaaaataacggatagctgcgcctttatcatatttgatgcttaaatccggattttcacctattgcaattctaatacagcattccaccatatttactccggttgaaagaggaacaaggtgtgttgttatattgtcaccacctaaacgtgcgcctatttcaacaattttagcaccatttggcgtgattttaatttcagtatgggatggtccattttttattccaactgctttgtttgcctcaaccgctgccttagcaatttctcttttcgttttctctgaaagacaacagggttgtgaatgccccatttcaacaaaataaggagctcctgtagtcaacttatccgttatctggataacatgacagactccatccacacttattgtctccacacttacttccggcccttccatgaattcttctacaatcatttcaccggtatgacaaaaacgtttactatataggaatgcctgatcggcagcagtcaaatcatcattatgttcaagaaggcacacgccacggcttcctgaattgtctgccggtttaacaatgaattttcctgtaaagcttctgattatcttatggaattcatcaatcgtatttacacaataaaataccgggataggaacccctgcttctttcagagcctgacgcatggcagctttattcgtggccttcaatgcagtgtcacctgaaattcctaccaatcccattttttcagcaactgctgctactgtcctcataggcagatcgctggctaacgtcataattccattaatttgatgtcttatagctgcctctaatacacaatcgatatcattggtacttataatttccttttcaattccattttcccggaatccaaccgcttccggattcatatctacaactactgcctccagccccattttttttgcttgaagaattgcgggaagctgaagtatacttgctcctaatatcattatttttttcatatgtattgtcctatctattgccctatcctgtctctcacaatatctatcgcatattttatatcgtctattgcatagcggtgatcacacggaaaagcaagcatatgagttgatatataatctgcaacagaacatatccccttggcattttctgataacggccatataacaggcaaatacagccctttttcacttaacttcttttgcagcgtaagttgatttacctctgttagtatgggataataaagagtgcttctgatggaattattgagcatggagtgaatgcacgggatatcttttaattcattatgcaagaattctgtgttcccgcaacgctgcgcatacattttttttaaattcatgcactgcagcagaccttccgatttatcatccatactggcaatattatctgttctatcaatataggcattggcctttctgaatgcctcgcggtaatattctttttctttccttatcctattatgaagataacagcttttatgttttaatccgtctattctcacatctgcaaaataggaatctttatccaggggtatttctctaataggtttttttgacagtaatacgcccccgtctggtatagcaaaccacttcctgatactgcagactgtataatacgcttcgaggctatctgctgtacggcttagaaaatcatgagtaatatcttcaattgtgagtatattgtttacacagttaatggtatcctttagatcatcggagcagaatgaaggctgaccaaaataattcatatacaaaaaaatagaattctttttgattttcattcgtacatcgtccaagtcaattgataaatcaggcttcaaacggtaaaaaaccacgttatatccttcatcctcaaaaggctttgacatacatgcacaacttaaggcaggcatcagtactgtggcataggaatctttatgtaatctagctacataacggattgcatcccgtccgcttcttaaatatttaatcctatcttccggtacgtcgtataacacatgctttgctgcttcaagtatatatggtttatttgaatcccaatcatattcgcttcccatttcaaaaaatgttctttccatctttgctgtcatattttttccaatatctttagtttttctttttcagtttcatccatctgattccgcgacatatctttatatgtgttttcatgccccaaaacaactacaatggattttaaaaatatttttaaatccatcagaaacgtacagtgctttgcataatacgcatcatttttcattttttcattgccatcaaccgagtttcggaaaaatgcctggctatatccagttaagcctggacgtacctgtaaaaatatcctgacttcgggtggatatcgttccaaccaatccggcggatccggccgtggcccaatgaggctcatctcccccttcaacatgtttagaatctggggaatttcatctatactggtactgcgtaaaaacctgcccactctggtaacacgcggatcatcaacgccattataagtggaaccgtcagccaatcgaatatcaggagcatttttcttcatggttcggaatttatacatcctaaaaagcttcccattttttccgattcttaacgcattatagaaaaccggcaaaccgtcgtccagtataatcatgggagcgacaactatataaatcagtccaaaaacaggcagccccagaactgataacattatgtctattattcgtttaaaacagcgctcatacatatatttatcctctgtctatttcatccaaaatctctttcatgttttctattacatataaaacatcctctttttcgagacatgtatgtaacggaagggtaatctcattttcgtataccccgtatgcattcggataatcctttatctcaaaacccatagccgcatatccactcatcattggcagtggtttataatggacatttgccgcaatcccacgttctgccagtttgataataatattgttgcgaactgtacaaccaatgccggggatccgtaccatataaagatggccgctggatgtataatccttggtataatgtttcagaaccttgatacctaacggtttaaaagcagcatcatacatgcctatgaagtcttttctttttctcatcatatcgtcatatcgtgccaattgtgccagacctatggccgcagtgatatctgtcatattacatttataaaacggtgaaacgatatcgtattcccatgatcccaattttgtcttagctaatgcatcctttgactgtccatgcagagatagcagcataaactgattataaatccaatcatcatccacacccttaatgtgtctccatgttaatgctcctccctctgctgttgtaaggtttttcacagcatggaaagaaaaacttgtaaagtctgataactcaccacacatttttccatttctgctggcgccaaaagcatgggctgcatctgaaacaataatgactcttcctattaattcctgaatcctattagatggacaaaacagcttttttttcctttggacgatatcaaatatcttatgatagtcacacatgatacctcccaaatccacaggaataataactttggttttgtcagtaatagacctttccaataaatcataatccatctcaaagctatctttcgccacatccaccatcaccaattttgctcctacatggcataccggactggctgatgccgtatatgtgtaagcagatgttatcacctcatcaccagggccaactcccaaaattcttagaattgattccaaacacgcggtcgccgaattaaggcagactgctttatccacattacaataatctgctatttttttttcaaataactttgtcttaggtccagtagttatccaaccactttggactgcctttacaatttcgtttatttcatccgtgccaacatctggtggactaaatggtatctttcgcataattatcctccaacaatttcgcatccgctgagaatttctttacaatctccaatcccagcctcacctctgtcttccggccaaacatttctatttcaataactgccagcctcttatgcctgtctataaatttgatttttcccttcatttctttcattggtccagaaataacagtaacaatatcccctatgatgtatcccttggacatttctgcaatataagcctcattaaccatattttttaaaaatcctacttcctcttgtgttagaggaatgaattcagtcccatctcctagtatttttgttaaatttggtatttgcttcaattttgtaaaaagaatatccacctgatctgttaccagaaaaatatagcctggaaacatgggaggctgctcagaatgccaatccccctgatatcgccgcatacgttcaaatcttggaataatacaatcctccaggataacccgaggaatcctcgccaggcataattctgccgtagcctgctcccttccggttctgacctgtaccgcataccattggatcatctgaatcctccttccttttcttaatccctatcctctaaatgggtatgcttcgccatcccctaaaagagaatctgtccttaaaagaaacagaaccagctttcacggccaatactcatccatataacaggcatccaagcagaatgcgcaaaggcgacaattctgtatgaatgccattttacctattattcataattccattcttgcagattgctactttatcatgccatattagtttgtccttcatcaatcctttaacagcaggctccaaactcacagcagcttccatatcaaccatttcagtattattttttctgtaatggtactcaggtaccaaatcatgaactaactccctcacatcagcgttttcactaagggccgcctcccccagacgctgtaaccccttctcaaaccggtcataatccatatcaatgggttttccaatgaatatcctgtcattgaccgtcttttgcaatccttcttcatccatgagaagttcttcatacagcttttctcccggacgtaatccggtaaagcatatatctatatctttgtatggctcatagccggataaacgaatcaggttctctgccatatccagaatcctgaccggattccccatattcagtacaaagatttcaccgccctttgcataggcgccggcctgaatcacaagacttaccgcttccggaattgtcatgaaataacgtatgatatccttatgcgtcactgtcaccgggccgccattttcaatctgctgtttgaataatggaatcacacttccattgcttcccagcacattgccaaagcggaccgcgacaaattccgtactgctcttttgattgctcatctgaaccaccatctcacagaggcgcttacttgctcccatgatattcgttggattcactgccttgtccgttgagatgagtatgaaacgctgtaccttgtatttaatggcggccccggctgttttataagtgcctaggacattattttttatggcttcattgggactgtcctccattaaaggcacatgcttatgagccgctgcatggtaaacaatatcaggcctgtatgtacggaaaagataatcaagacggttcgtattgcgcacggagccaatcagcaccaccagatccagacgcggatacttccgttttaattcctgctggatttcataagcattattctcatatatatcaaatatgataagctgctttaccttatggactgccagctgcctgcacagttcactgccaatggaaccgcctccgccagtgaccagcactacttttccctttacataacccatgatttcatccagattaacatttaccggttcccttcccagtaaatcttctatctccacctttcggagtcttgaaatcgtgacctcgccattcataagctggtacacgccgggaagtatcttgacctggcaccctgttccctggcagattttcaaaatatcccttatatcctcaggaggagcagtaggaatggccacgtaaatctcatcaatccccttctcccttacaagtcttgctatatcccttcggctgcccataatggatacgccatcaatgacccgtccctgtttgtccttgtcatcatcgattatgcagacaggatatccatggaccctttcactggctttcatttccttaagtataagtgttcctgcttttcccgcgccgattatcatcacccggggcggaatgtttttttcaaggaagcggtttatcctgtccgtgattttctgaagcacctggaaactgacccgtccactgatggccgccccggccatcagcacaaaccacagcatataatagctcctcggcatacgcgcatccagtaacaaaattcctacggattgtgccaaagcagcaaccaggcaagccagcaggacctgcatcatctcccggatacctgaaactccccacatgatggcgtaaaggtgtcccgcataaaaaacaagggacaccacggccatctgcaaaagtccgtacttccatacctccctggcatactcaatgggaacagaggaaagactcaggtcaaatcttaatcccagggccaggcacgcgcagatccataccatggccatatcataaccccatagtatcctcatcctcactgttttactgcggggcaggtatttttctaatacaagtttgtttttacctttcactttcacattccccttttgtaccgtaattcagggctttatcgtttgtagattacagaaaacgtacctgagttaggaatattaaaccaaatcgtcttggaagctgcatccaccctgtttggctgtatcacggtccaggtaccggtcaggttattatagaaaagtacctgtacctcacccaggccatcaacaagattcggaacatacagcggtacttctaccatgccggccttttctgtgtccgttgccgcatctttggttacaatcgcatgtgtactgataagggcattgtatccatccaggtttgttcccggaaccaccccgcttaacggactgccactgtttattccattaatggttgtaacagtactttcaggaagtcccgctacagcgcgttcatctcctgctataagttccaacgccgtatccccaacaataacctgacccttgctgtttgttgtgacccccgttctgctaatttgaacagtatttaccccttgtgcagttccaatggtgcctttgcctaacaccctgtctaccctctccccaatgtcataatcgctgtccccgccattatcaccaatgaccgggcccgtgccagggctgttggcggcataggaaatcactgcctgtgacgctgcaagcgcagctgctaacgcaattgttgtaatcctttttctcataatctttacccttcctttcttgaactaaattgaacatttattataagtattaattatcatacctattttcccatatccgtatcagccgtttcctcccggtaaaacatatccaggataataggcctgatctgagatttatcaggatggtattcatcataaataggtgtctccactgcctttcccggaagtgtcatcatgtctgactccccaaagtcctggtttcctcccagaaaggctagggccatgtccaaatatctgtcttttgtcatgtcagtcaccatgtagggttccgtttcctttaataggccggacacaaagctgtcatcttttcctgattttatctttgctgcctgaagcagcccttctatataagatttctggcgttccgcacgccccagtgcgctttgcgcctggccggtgtccctgcagcggatatattcctctgcctgtctgcccttaagcgtgaccgtctgtccgtaaatgaattcagaatccacccgttccatcccctgttccttcacggtcacggtaacgcctcccaccccatcattaatgataggcagggcagacatgctgattgccatgtacccgtcaatggccagacctcccaccaggttactcaccgcctctttcatatattggcagcttttattccttccgtctccataggcataacctaatgcaaggtgctggatatccctgcccaggacattgccgcttaaatcagtcagggttatttctgtcatggtgtcccttggtatcattaggagctcagccttatccctggccatatcctgcgcaacaaggaagattgcatctgcctggcctccggacccggcgaccatggtttcctccaggcttcccggcctgtcgattcccatacacaggatggctttgacatacgtattacggcggtaaacctttccctgatactcaatcctgtctgccgcgctttgttccctgtccccgtccacatcctgatgccactgcaggacatcttccgccaatgctcttttttctaaatacagctgaccggtccggtatagaaaaaatgcagtaaggaccgatgcccccgcaatgactgcagccactttttttctacggttttgagtccgaatgttttttccctgtctcatattgccctttatctatagctgcccatagtctatttttcgcccccccccccgtattttccataatatttcccatagtattttttgtaatatccattttcgtaatcctcccccacccggttgaggaccgcgcccagaatacggcatccgctcttttccaactgtaccttcactttttgggccaaatggtaactgattgtatcactttcaattacaattaccgctccatcacattggccggcaataatagctccatcaataagatttgccatgggcggcgtatctatgatgatataatcatatttttccttagctttttccaataattccttaaacagctgatcttccagaagttctgccggatttggggaatatggaccggccagaatcatgtaaaaattttctatatcggtggcataacagatatcctccatggttttctgtccgctgagatactgggacagcccgctgggactgcctttaatttcatatctttttatgaatacggatttgcggatgtccgcatctatcagcaaaacctttttacctatgcttccaaaggacaccccaacagagaaagcgatttcactttttccttcatcgggcaatgaacttgtaaacatgattgttttcagactgctgccgcaaaactgtaaattggtcctgagtgtcttgatggactcctcaaaatgatagtccttcccacctgtattctgcagatttagaatttgttccacgtcttactttctcctctcagccctttttgcctgggttttcctctttttcctgcttctctttccttcactgcccttctccggtttatccttctcctctatgttgttttccggaataacggccaatacactgatgccaagataacgggagacatcttcctcggaacggatggtgtcattcatgatgacctgaagtgtaataaaaccacataccgccacggataaagcaagtcctcccaaagcagcgttcttttttatattaggagaagtggggttatcaggcacgacaccattttctatgattttaggcggaatcatttccatgatatccccaatatagtctgaggatgcctttgctactgcatccacaatggcttttgccctgaccggatcagtatctgatacagacatgttaagtattctggtatcggcaggatttgagacgcgaatcatactttttagctggttgtaggataaactcagtttctgtttttcgattaccgcctccagaacaggcctgctggtaatcattacactgtaatcctttgtcagctggcttcctatctgcaggtcagccagggaagtgagtgttgtttcctttgataatacatacaccatggaagtggatgtataaaccggacttaaaattactttgctgtatatacctgccccaaggcaccctatcattgctgccagaataatcatccacagttttttccttaaagcaaacagcagctcaactacatcaatctcaattgcgtcttcatttctgtcctcatacattctgttttccatcacaattaccttttccatactttttcttttgctatagcattctatcctgcaggatgtaccccggattcgtcctggtcatccgaaccgctgtccttacccccatattgtgttccatccacgaaaccgctgtttggatatccggggaacggtccgatgaattatgcatatccgtggcaataaaatgaatcgtcccttttttcaggttttttctgcaccagcgggcccttttatccatccatcccccattcaggctccgggagtttatctgaaggtaagccccatattcaaccaattcctccggccgctcctgttcaagaagacatctatagcgctccacatgtgcaattaccgggaaataggatgcctgaatcagttggcgcacagccctcttcattctgccaaggctgtccgatggtccgaactccaccaacacatatctgctgccagccagcgtaagggcctttccctgattcagatattcgatgagattttcaaaatacctgatttcctgtccaaggctgacactaaagccgtctgatatggctttcgcatggtaatccagacatgtacataactcctgaagcatccctgtgtcctgattccatgtaaaatgcggtgtggctatgatgtgccggattccctgcccatatgccagtcttaataatgccatggcctcatcccaatcataagctccatcgtccacccctggtaatatatgtgcatgtatatcaatccagcctttgttagaaatccctgtattcatcaacacctcttccatgcgcttataaagcgcacaaaccgctgtccttttcaagcctgtccgccctctgaaggcttttatatttatgcatacctcagaataactattccgtggtacctcttcaatctaaggaaagaccacagaataactattctgtggtatattcctgacaaccttagccgcgaattttattataaatatatattgtttcagattctgatataaacagcaaaataacatacacgtcaaaaaggccggttagacattatttcactcccggcctccttgaggtattgaaaaaatagctatatgtatattgacgtcacaaacattttggtataaaatacaaacaacgctatgttttgttaaacagtgtagcggctaagtaccacagaatagttattctgtggtttttgtttatcaatttcaattttcatcttattcatgattttttcatactgtttaatactagccgcaacataaatcctcgtggtttcgattgaggaatgtccaaggatatcggcaagatgggacagatttttttcgatggaataaaaacattttgcaaaaagatgtctgaaattatgaggaaatacttttgacggttcaacctgagcatccccgcacagcttcttcatggaatggtatatattgctcctgtccaggtttcttccactttttgtccgaaaaatgcagccatgttttatgtttgacatatttatatattcttttaatgaacggacaagatttttagggaaaatgattaccctgtattttcctttcatggatatttctgcctttcccgaacatatagcttcgactgtgacaaatggaagttcactaatccgtatcccagtaccatataagaccatcattaaatagtacagctgcttatttccatttctatctgccgtctcaagaagccgtttgaaatcctgttccgtaagctcccgtttttcgtctacatatacctgtttctgtacctttaggaattttaccttaaactccaataaatccctaaactttaaaaatgcgttgattgctgagagttttccatttacagtttgcggcttgtattgtctgctcaggtgcttccggtattctatgagagactctttgtttaaatccatgttctcaatgaataccagcatctcttttacatcatgtaggtatttactgattgttgcttcggctttttcttcatttctcaggtagctttgaaattggttaatatattcttctgtcataaacgcctccattatccttcacatgcctgaatgttattccagctatagttaattgatttttcctaatttttagtttccctgatttagaatattttcatactatatagaatgttttatattgtccgattatttagagttatcatttcttcaatcataaccgtaaatgtaaaatatccgccatgctttgtgggaataggattctcaatatcctatagcaatgccccctgcaaaaaaaagaacctcgtaaagaaacgctctttacaaggctgccataaaaaaccacacatcacaccaccaaacatagcgtgattccactacctttctaaaatatagtgcccacagtgtgatataattcttcaacaaattagtcctcactctgccccggattctgacatcggcatagaggtatgatatccaaaactctgatatacttaaagtcatttttacaataaatctgcttatctatgcaaataggtttcgatagaattttacggccctttgggccgcacttccaacgtgttctactgattatttttgcctcattattttatcattttctttcatttcttcatgtggtttcttatgaatgatagacattgcctatgttcataattttatagtataatggatagaacgctccttgtctactgagggcatatttgtattttttagcctgcaaataaaaagtcaataggaaattgaaagatttttcaatttctttgtgtagtgaattgtacatagtaaggttttccctgggcgcgctttttatctataaaggagtatacaggggcatcctgaggttttgttttgattaggcagtccatccacttgaaattaaaaaatcctgtaaactgtcctccaacattttacaggattttcatatttaatctcgcatttacacattcatatgcatgaaaaatttctcactatgccaatgtattcatcaacatgcctaccgcataataattccctaaattatagggactgctcttggcaaaattgtaaaaatactgatacatcgaacgatcgtaattttgcttctgacttgaagttgttcccttctccgctgtccccttcaaatcattgctcacaatccgctgtacagaatctgaaagagcagcatcagagcgggctgcaactttttcagcaataccaaattggcctcctataatagattttgttccatcgaaatcagtttccagagcctctctcagttccttttcatccagctgcagttttccatccttattataagaaattccaatagccgccaatgttttctcatcagccatgcctctgccaaaggcctgtgcgtgggcagctgcgccagttcccctgtctgaatttccctgaagcagggactgtacggaattatatccgtttactaaatcttttacagcggataccacctcgtcctcgtctattcctgtataaatcctgctttcaccggttcctttcagctgtgcctctattctgccataatctaaactgattctgttggacgcggattggaactcagtggtaatcccattctcagttacactatataccgcatcctgggcaaaaacagacgccctttcaacacctgccgcagctccggtttctccgctgacagaaaaccctcctgcctccccctcttttcccgaagtaaggaccagagagacctttccctccacatttgctacagaagctcttacgctggagccagcctgggcattgatggattgtgcagcctcctgatacatctgatgatatgttttggccgtgccgtcctcattggtacttccaatggatacagatacacgctttccgtcacatgtcattatctcgaagttcatatcatctcctgatgatacttcctccgctcccacatgggctgcgctggtattctgctgtgcctgggccagggattggacattcaagctgatatccgtatcccccttaaggctgtaggttccggaaacctccgccaccttgctgttagtggatgctgcctggtaatcattaaacacattcttactgctgctttccttcagcttaaaagccgcgctttccaaagatgtaagctctttctgatagctccttagaaaatcatgacagccgctgctataggctgcggaagacaccctgttcacaggttccactgcctgatagcgcgatgtctgccttgcattggacagctggagcatattcagagtgttttgatactggtaatagctgccggataatccattaaccgccatattcattcctccttttctgattttttataaagccctcaagtggcgctttatcattttatttgtaaaacgactttgtgccagctgctctcttatttactattttgtccgcatcctgtatctctttaatgagggccgctgtctttttcctaagcttcaggattttatcttcctcatagctcatcccttctgccattgacaggaactccccggacataagcctgtggatatcctcattttctctttgtccctcttcggccattctccaaatcagctcctggcaattttcaatattttccatttcgtccgcacgcatttggagaatcaaaccggctgacacggaatcttcccgcgagacagcgtcctgcaaatcagctgtaagacgtttaatttctctcaggaagttataccgtctctgcagcaagaccatcacctgttccaaatccagccccatatccgtctatcccagcacccctctcctatctgtcatatgtacatcacttacctccctggcagcctgcccaaatgcctccttcagctcgctgagtatatggcttatccttccaatttccttttgctcccgttcccggcccgcctttactttgctgatatccagtattaaatagtcgtaaatcctccggaggtcatagctgattggctgtttcatatccaggatatcaattaaataccgcacaatgttggaagcccgtctcaggcaatcatcaaacagcgcatattccttatcatccaaagccaagtcagccttcctcaagcgtccaatcgcctcttcatacaataaatcaagcagttcccagctgctcatggaatagacgctgttttctttatacttttgataactgttcattacattccctttctgacatgaaaccgcttcgtcattacttaagctggctcaggtagctggactggctgttcatccgattaattaatgtttccatggaagtaaactgctttatgtaacggtcctgctctgtcaaaagctgggatttatatttgttcagaacctcctccatgtcctttaactgcctgtaaatctgattattcatgactgaaaggggtaccttctctgaaccggcctcctcaataagacgtccgtatgaatttccattttcacttctgtatctggttgcatatgtggtcagcgtatcctctacaatatttgtaaaaccttttgtcacactgccgccgcctgtaaatacatttgacactttatccggatcactggtcatagccgccctgaatttcgcttcattaaacgttatggtaccgccgtccaagtaatcatccgacatggtaatccccatctcctccaagtcctggtaactgattccactgtttaacatctgtgtcattacggactgcaggtccatgctcagcgaacgcatagtggcatcgttaaacagcagcccttcctttgcctttttctcccagttttcaatggaggtttcagtcatctcagccttttgggcatctgtcagaggaccatatgatgaatccggtctggtagtaatctgcttattgacttctgtaaccattgcattatattcttcaaaaaatttctttactgcttcggtcacgccgtccacatccgctgatgcgctgaaggtaactgccatggatgtgtcagaagtccatgaaccgtcctcctgcctcacatctccgaaaacgccggaaacagtgactttcataccgtccaagtcaaaggtatttgaggaactttcaacaagggtttttatcccattcccatagcttacaagcacctcagcgtttcttcctgcttccaggctgccttcggttaccttgttggtatctgtttgtttgaagctgctgtccacaaattctccgctgtcagtcctggctccaaaaatggcttttgaagcgccgtcaagggtaatctcccttcccttgcctgtctctgatgttaccagaacaaactggttggaacttgaaaggtaggaagcttttacaccggcatcttcatttgaattaattttttctatcattccgttaatggaggtgtcggctgtaactccctttatcctgacgccgttaataatcaggccgttttgattcaaatccgcaagaaaagcctccttttcatcatctgtggcatccggcagtaatttatcaatattatcacggatactgctctccgcgctcagtttattactggcccctttctgaatccccagtgtttttcttacatccgcatccctggaggtaatggtaagcgtttggtttgaggaagccgccggtcccaggtcgaattccaggctgccgtttttattctccaccttaatgttatctgctccaaatgcctgattcagacgtttctgcatggtctgctgaagttcgtccaagctggcaaagctttcgcctgattttaccagctctatctcctttgtctgtccgccaaaactgaatgacagcttctttcccttcagaaaatcaaccatattctcactggatgcatatgtatctttaaagagcttctgattttctcccagcttctccaggctgattccgttggattcgtcctttccctccgaatcatagcccagcgccttcaatgcgctggaggatgaccggatgacaagatccgttgtcttgccgttcttctcctgcaatctcataacgccattttcatatttaaactcagccacatccgcaagtttgtcattccccgacttaatgctggactgagccagggctttatttaatccctctgccagttcttccccgaacagcctgcctgtcttgccgtttacagcgtccatatcagaggtatagtcaagcgtgactgtaatttcttttccattctcatctttatccgtataggaagccgggaaagtaaaggtgccggctgatttaaatctgtgatccgttacgctgtagataccgaattccagcttggttccttttaaatttgatgttctgtaaacctcatttgtaaggctgtcctctgtaatccctgtcttaatactttgggcctgcttgccggctgacagcagcgtggtggaagacgccatctgctttacgcctaatatagacatgtaatccgtcatgctggaacttccgctggctgatacaaacttagtcgcatctgtctttcccaatgccgtcaccctgttttttgcaaatacagaagcatccttcagattaaagccgctgctgtatgaaaaataattatcctgcaaatccagaatttttgcgctgacagactgatacgcctcctgcttccagctaaggcttgtcatctttttattctggctggttatctttgcctgagtccctgctgtcatctgctcaattattgcatcgcggtctataccggaggacagaccgccatatccccttaaactcgtatttcctaaactgcttgttgcgccagatacacttgccattttccgttctcctttcatctcatgctgattttacttttctctttattttatcggcattttttcggaaacaataagtgagaaagacaataaagttaaaaagccggccgaagcagcataaataccgctccggccgacctggactcagttcttccgtaaaactcctttcatatcatttttttatcaaaaagagtcagcgcatatccttaagtctaaaacggcctacaagatccttaagcaggcttgactggcttgacaattcctggcttgttgccgcgctctcctcggctgtggctgcattagtctgtacaacagatgatatctgatcaactcccgtagttacctgggcaattccttcagcctgcatactggccgcttccgtaatctttgccatacccactgtaatcttctgggctttttcaacaacattaagcagggaactttgtgtctccctggcaatccgtgtcccctctgccactgcttctaacgagtggttaatcaataccgttgtatcttttgcagcctccgcactcttggatgccaggctccgaacctcatcggcaaccactgcaaagccttttcccgcagtgcctgcccgcgctgcttcaacagctgcgttcagggcaaggatattggtctggaacgcaatatcctcaatggttttgattattttttcaatttcactggaactctcgttaatccttgtcattgcggacatcatttctttcatttgctgattgctgccttctaccccattgcccgcagcctccaccagcacattgatgtcgccggaattttgggctgtctgcttaacctgctcagacagttcattaattgtagctgccagctcttcaatggaacttgcctgctcggttgctccctgactaagggactgagcgccgctggatacctgctctgatccgctggccacctggttggaggcccggtgaatctgactcagggcgtcattcaaggtgctgattatcttgttcccggaatccttgatggatgcaaattctccgagatagtccatatccatctctatagtaaaatctccggaagccattgagtccaggcggctgcatatatggcggatgtatgcagacaatgtggataaaacaaagcgcaggtcctccgcaagtccgccaagctcatcctttgaagtataagtgaccttagagcccatatttccattggccatttctctgacagcgttttctatctccgttataggaaaaaccaattccctggtcaggcgttgggttataataactgtaataaacaaaagcataagggaaaacacagacaaaaaaacatagctcatgcggacggtagccactccggaatcataataagactgggcacttttctgagactcctctatcacgttctgaagcgccgtatcaaaattcccgcaggcctgcctgtattctccctcaattacaagaagggcgtttttgtcatcccgcgcactgatatactccaccgctttgccgcggagggagcttacatttgcagacgtgttctcaaccgcctgccataaagccgggctgccattccatgcgtccttaagagcttccagcgtaacggaaagcgcagacgcctcgccttcaatctcacgcatgattgactgaatctgagcgtcatcatcaagttcataagaacggtacacgttcagctgaatcttccttgtaagcgcctgcgcttccacagccgcctttaccgatggatagggtacgcggtaaaattgatccagcttattaaacatgcggttaaatcccataattgtaactaaaacagctattatattaaaccctaaaacaattccaaatccaatctgcagctttcttccgacttttaagtctttaaacatttttttctcccccgcattaataaatcatatattaccatacacaccagggttttatcgcttacttttctcttgattacttagccctggagaagccgaagcgcaaattccggcagattatttgcatgggagagcatggcattggcagcctgaagcaatatattttccgtggtaaattctgtaaacttctcagccatatccgtgtcacgtatcccgctttctgcagccgtcatgttctcctttgtcactcctaaattattattggtatgctccagatggtttaaagttgccccgaaagatgcccttacgtcagccaccgcttcaattgccgcgtcaatctttcccattgcctcattggcagtctctccgctgcgaaagctgaccttatccagaagcaattctttgcttcccatataataccgacccacatccatggtttcttccgatgaatgaccaatctgaagcactatgttatcctttaattccggcggtgtgaagccaggcggaattgtttctgcggttccaaacaatggtattccagcaaaatccgttgtctggctgatacggtcaatctctcccagcagttcctgacgctccatatcaatatttgccctggctactgaatcatatgtaccattggctgcctggacagccaaagtcttcattctctgaagcatggaatgaacctcctgaagcgctccctcaccagtgttggtcatactgataccatcgttgttattgcgcatggcctggtccagccctgcaatctggctgcgcatcagttccgatatagccagtcctgccgcatcatctccggcacggttaatccgataaccggatgacagcttttccagagttttattgatttttccttttgctataccctggtttctggccgaatttattgatgctatgttgttctgtatccgcatctgtccttccacctttctgctttgttctatattccatatgttttaatatcggcatattcgttaaaaacataagtatttttaaaaaataagcatcttaagccgttctccggcaggttcaaagctgacagccgcgtccttataatattttaccgccttttctgtctgacctgatacttcataccataaagccaggttgtatgccgccttaaaagagccggtgccagtcacgccgcccgggcgttcgccaatccgaagacattccaggaagctgtcctcaatcctgggcagaaactcaatatataatgaaacatctgaaagcaccagcttcatataaaacaaaccgcatacaaaccagaaatccgcctggtcctgcatatatgactgttccctttttacaaccgcgaaagcctcggacaaaccggattgtgttccggtctccagcaaagcgtacagataggaaaccacaccttctgaccaatacccggatttccttgatgcattattataaaattcccgaaaccagaaaaggctttcctgagacatgtttgcgtttcgcagtgtaactgccatttgaaacctataatacatatcttccggatagtaccggaccgctttctttaaatattccagattgcgcctgcttttatccgtatataggtatccatcgtgctccgcttccaggggaagctttaaaaaggggcctgtctcttccggctgctcgtggataatgccaaaatagcaggcccttcttggaagaagcctagggagataagtaagactgctttctgtcctcccctcctccttccaaaagtccctgcgcagtaggctgccgatccatcttccaccatatctggcggaataatcataaatctgccgctccagtttttctctgctgcaaggcagcagatactcatccgcatccaataccagattccactccgcgtccgaatgcctgagggcaaaattcctggctgccgcaaagtcgtctttccacccatattcccacacttttgctccatattttctggcaatttccactgaacggtccgttgagcctgtgtcggctattacaatctcatccacaagccctccggcctgctccaggcattgtcccaaagaacgctcctcattttttacaatcatcacaagattgattttcatatcttctcagagcccttttccctctgtttcttgtatacaaagcctcgaatcgctgcttctccgccgtctgtcagccccacaaaacggcagccatacccatacccttttcctccggcctgtcccacccgtaaaacctcaagttcaaaggggcgttccagtgtccggaagttataggaaaaagcaatcttctctccttttaacagcggctttttggttgtcatatagagaccgccggcagataaattccggactgtcccgaaaaaggcagacccatcgctgcatttcctgaatttaatatctatctttatttttacacggatatccttttggcgctgcaccacctgctttacatccagtataacgcactccgcagcccagggttccgcctcctcaggaaaggatggatttctgtgtatgataacctcgctcagcgttataatcatcccgcgcctttcatcaaaaaaatccactcttgttctaaaacgtccgtctgaaagcccatattcggtgaaaaaaagggagattttattatttgtatgtaccaccctggcttcagcaagacgttttcctttatgattatatacagcacaacggctgcaattctttaaaaccgcatctctttcatttatttccatttaattcaaatctccatgactccaatttcccttcctgcattcatcatcatctgtatgcgaagaatctgaatcaggctgttaaagctctctttatccataacaatctcgtccccctgctgccggaaagacagattttcaaatacccctggtgtgtttgtcaggctgtttacgccccagcctctgtacacgtcagagcctgccaggaaactgctgttccccgccatgctgttccccgccatgcccttatacggacttctgacatcccggtcagctgtcagggtttcccccatatatcccattaccttttttacataattctgtgtctcctcataaggaggtatgcctccatatttctgaacgcttcccggacctgcattgtaagcggccagagccagcttcacatccttaaagcgatccaggttttctttcaaatattttgctcctcccataatattctgccatgggtcatatgggtccgcaactcccaggcttttggccgtgcccggcatcagctgcataacgcccattgcccccgctttcgacactgcattggggttaaaattagactctgttttggccactgcccgcagaaggtccggcgacagtccaaatgtttttccagcctgttcaaatatagcgtccattgccatgttttttgcgctgttctttaatatatttccaaattcacagctgttcttttcccgcttcccgctttcgcctgcccttaaacgcaatgactccgcttccgccacggttgaaattaatcccatggtaaatcattcctcctctctatggtatttacgctttccggtggtccttagggattcaagtatgctgcgccgtccgcccctatctgccatccatccacagttgtatccacagccatggttccatcttctcttagataataccaacgttccccgtctaacagccatcctgtcttcatcaggccgtcttccctcaaatagtaccaggaaccgggggagggctgcacccagcccgtctgcatttctccattttcattcagataataccaggtatggctgtcaggtgaaacccagcccgtgcacatggcgccgttttggtccatgtaataccatctgcctcctgtctggacccagcccttgacccggattccgctgctgtcaaagaaataccacttgcctgaaacctttttccaggtattggacgccctgcttccatcaggcataatgtaggaatcccccttaaattcccctccatcgtccggtctctgtgtccttttttcttcctccccataatcatcccagtcaaactcctgggatgtggaggatacatactgcccttccttcagatacttcttttcatccgcagtaatcggaacagccttgacctcataataatatgtcttatccatatcttccataaattccgcaagattagcgctgttggattccactgtcatccgttttactaccttattatccccatagagcgttaccgtgtaccctggggcatactccactgatttccataccgccttctttttggaactgctgctccagcccgcccgttctgtctctcccaatacggaaacaggtctgtaatccacctttatctgcagtctcgcgtcctccagggcgcgggccgacacaaaatcggctcccgttaccttacattcagagcggttaagggaagcaggaaaatatttcccgtcatctgcatttaccgtgatttctatcctcaccttttttcccggtttccatttttcatagtctgtcctgtactgaatatcctccagggtgcagccctttgtgcttacagtgattaccggctccggaattactcccgcttccccgtagtcagttttcagatttaccgaaaccttctcaatcacgctggactgggctccctccgcgtaaatacacggctttgccgtaaccatacatgccgctgcaaatgccagcatcagaccatatcttcttttcatccctgcctccttatctccagataccgtcctcgtctacacggaatccgtttatctctgcattatgcgccatttccccggagcccggataaaaataatgccaggctccgtcaatacagcaccatccttcagccatttctccgtttgaatccgcaaagtatgtttttccatccctcttaatccatccggtaaacatagctcccagaaggctgttatccactgtattcagataataccaatgtccgtccttaaacagccagccggtgtaaagggaaccgtcatcattgaaataataataatacggccctatgactctccagcctcccgccgccatactgcctaacgggttctctccttcctgttccgtgcagaagaaataccaaagtccgtccagcctggcccagcccaccgccatctgtccattgggatataagtaataatacctgcctccaatctgctgccagcccgtaagcataatgccgtccacattaaaatagtaccaatacccgtttatttcagcccatcttccacggcacaattctccgctgggataacggtacctccagacgccgttctcttctgtccagccaacggtgtccattgttccttttaccactgtgctttctttgttttgctgtccttttccatcggaaacataacggtccgtaatctccagctcgcctgattcaatccattcacttttcttcccgtactttacctgcgcctctgtctccggtacggtcctgattttaaaactgtacatgcccttttccgtcatgtaggggtaaaagttatagcgcaggcccgatacttttgccagtttataaactgtcctgccatccctcagaagctgcgcctcataatatcccgaggtattttccggcttctcccacctggcttcccccaggttatcttcatgccagaatgcatcagggggcgggtcatactctccctttacgccgtttacccgaatggttacaaccagggcgtctccatcgcgccttgccgatacaaatgttccaccgctgacttttacgtctgatttcttatagcttgccagaaagtagtcctcacccacatcagcaggttcaagagtcaccttcatccgcggttcatccgcggctttgattaccttatcccccttgtccacccactcagcttccgtcacatgatatttactgttgctgcccgaaacgcttatttccccgtccttcaggctccgggtcccaatcccgattgaaggcagacgccctcccggttccagtttggaattcactttcacgctgacagtatggatgggcctggctgccgcctctgcctctgacgacattcccagcatcagaaaacatatggccagagccattcctatccgccgtattttcatagcccctcctccggtttataatccaaaaaatacaaatatatttccaccaccgcctgatacagttcctccggtatggctgaacccagtttcatctgactcagcaggactgccagggaatcatcctcgtatacaggtactcccgcctcagcggcggcttccgtaattctctccgccagataccccattccggaagctacaataatcggcgcccggttattctttgaatcgtattttaaagcaaccgctctttttttaatcaggttgtcaaattctgacattgactccatgccccctctctcttatttccgggaaagcatcctggatttctatatccctgtctttcccctttaccagaaaacggtttactcccataccgtttttcttaaaaatctcggcaatgcctttctggattacatcctgctttttaaccaaaatatccggaacatccagctgcatgtccaccttcctgtcctgaagggacaaaaacagctgaaatccccctaaatcctgcacatcaaatttcagcagcagtttaatcctgcgtccccccatatccccctctttttctgaatccggattaatccataattccgacatgacgtccttttccctgaacctgaaagggagcagcaaatgcaaaacaggcatatacacgctctcattcaaaagcattccgtccagcgcgttttgaaactgctggacattctccaatcccccctgtccctttgccccctttaaaagaagcgcggcaaacgcgtcggaaaaagccctttctctttctgattgcttcagggtctccaaaatccgggacagagcctgatcccctccgtttttgtcaaaacgctcatattcacggtttccggtcatgcgctcatatagctgagccagcctttccctgcttccgttctcataccgcacggcatggaaaacaaacagcataattgcatctctgaccgccccgtagtcatgtgtcctggatatgtaattagataaaaagggaatcaggctgttatttaaaaccgctgtattagcagccgtatccccattttcagccccccactccatgccatccagtatctgttcaaactcatctctaaagccccgaaacatcagctggtttatatcctccgcaatggaccgcatttgatggagaaaatgctcccctgatgaaaaatcattataaacttttaaaaaggaaaggacggcttcccttaagctgtcagacgccccttgtcccagaatactcctcagcccgtcaaaaaaggcgcctgaaaactttgcctgcacagactgctgttctttaaaaaaggataaaagctcttccggcgtctccagccggactgaggccatcatctgttccacaagttctcccaccccggctgcatcccctgataaaagaccggtcccctctcgggcaaacagctgttccaacagcctggatgtctgaaccccttctccgatttttttaataaaagctccgtaattgctttcatagtctataacgctgtaaccgttccctgatgccgtattccctgcgtcctctgtttcctgtccgtccgcccgtacaacacgggatatatccaccggattgtgaacctgccggttttcctcatagcctccggttttctgtccgtccggcatatttctgtcaggcctgacagggatattgcttacctgcaaaatatttgccataatacctccatgaataaagaccattctattcctattttaatatcggcatattttcattttccattagcactatatttaaaaaatatttagatagtttttcactcaggccttattatctgcaaaaaagagccgatataataagcatgcggaagcttcattctggcaaaacatctggttttgtctgtgagataatggattcatccataaagggaaggaggtttttatgaatattaaaccatatataaacagagccgggggattagattacgtttctcccgcttcttctgcaaatccgtccagagcatctgcggggcgcctgacatgtgattttgacagggtatcccttaaggaatcctctcattctccggatgacgcatcctttgcccgcgccctggcccatgaaacagctgtcaagctcgaagcaggcgcaggcagggaacggattctctctttaaagcagcaaatcgaggccgggacttatacgccggattccaggcgcatagccgaacatatgcttggctaccggtaacaaaaatggagggaatatggataacacgctgaatgaattcgcctgttccatcactctgattacggataccgtgaaggaactccggcagattgaagagcagaaagcaatttccgcttcggaagggcggcacgataaaatggatgaatttttaaaacaggaacaggtatttcttctcaaactgcggggcctggagcagagcaggcttcgctgtatggaagccatgggctggaaagaccttacgttccgcgggatactctccggattacccaaagcgcaaaaggaacgcctgcttccattgtttacagacctggacagggagcttgggcttctgctggatgccaaggacagcgcgcagcggatcattaccctccgtctggctgagtttcagcaggcccttttgaaacatggacagtcaaaccaactatttgaaaggaaagcatgatatatggtacgagctacatttgccggtttttccactgctctttccgccctgcaggcgaatcagaagcggctggatatagtcggacagaatctgtcaaacatgaatacggcgggatatacccgccagcagctggaaacctccagcctgaattatacaaagcccattgcccattatatgaacggttctgagatagccgtgggtttcggcgtccatatggacaaggtttcccaaatacgtgacccgtatctggacgcccagtacaggactcagatgaaaaaggccggctacgctgaatccatgcagacctccctggacgttctttcaaggccgtttgatgaaagtaatattgatggaatccgcacagccattgacgatattcaggccgtcctcactgacatgcaggatttagacaaatttcatgacacagtatttgaaagcaaccttcgttcccgcatgaacgaactcaccaatcttttaaatgacgctgcgcggcagattgagtctgctgaaaaatcagaattttcaaagctggacggtaaaggcaccagcgagaatggcgctgtagacacggtcaaccagattctgcagcagattggggatttaaaccggcagattaaacaaaaccagattctcggacagcagagcctggagctgctggatgagaggaacaatcttttggataccctttccagctatatacctattgaggtttcttactttaaagacagtgaccatgacggcgttaaactgggcacggacggcgttaccatggaaaacgctccggaagagttatatgaatacgaccactacggcaatattataggaagaaaggactggccggacgacctgaaggtggagctcctttatacagctgctgacggcagtcagcagcgcctcacccttgtcaacggaacagagggcgcaaaaggcgaaaattacggctccctttccattgacggggggagtcaggatgctcccgcaaaggcatctgtgaaatttacggcagccgcctcctccagcgggacgcggtctgcatccgcttctgcctccggagtccagctgtccggaggctccatccaggccagtcttgatatgcttggaaaagccggtaccggtaaaacgattaaccaaaccgctgtcattgatgatgtaagaggttatcaatattatatgaacaggctggataccctggctaaaacctttgccaataccataaatggaattaataataaaaacgattttgtaccaggcggccaaggcggcggagtacttcttgccaataagcagaacaactccacggcaggtattacggctcttaatatcggtataagtgaggattggatcagcggcaaagcccatattaacgaaatgaggaataatcccacagacaccattttggatatgctcaattccatgacggatacatatgcggatttggataacaaatcatttgttgattatatgaataatatttccacagtcttggccaatgattccagttataactccaataccctgaaaacagacgttaccgtgttaaacggcattcagaattccagggattctatttccggcgtcagcatggatgaggaaggagccaatatgatgtcctacatttctgcatataatgcggcatcacggctgatgacagtcttagatgaggcccttaatacattgattaataataccggcctggtaggcagataatatagagaaggaggtactgtttattatgcgtgttacaactactgcggcttaccgtaatttcagtggttctgttaacgatgtccacagccgtcttaataaaagtatgaataagatatcaagtggaaaggcttatgaaaaggctgctgataacccccttgcttactatgagggaaaaaaaatcgacaaccagtatctggatacactgagtaaattgaacctgatacccgatgtaaaaaaccgcctgtaccagcaggagctgggcatccgggatattcagtcacggttatcaaaagcaaagggccgcgtagaatatatccttaatgatgcaaacaatgccgaccccggcttggtgcagactaccagggatgagcttctggcctttcagcagaccatggccaatgatttaaatgcccaatatcaggatttttatatttatggagggaatgatgtgtccactgctcccttttccctcagcgcggatggaaagaccctgacttatacccacagattttccggtgatacggaaacgactaaaatggtgatgaccctgacaaaacaggcggacggaagttataagtatgaattcagcggcagcaaagggtccgctgccctggatgaaggccagacgcttgatgctattgtccgctccatgaaagaacagggaaggatggatataggctatggaacaatctctgaccgcgaaaccctgatggatacctatacaggcggcctgaacgctatcaccggcctgtcctccgatgctgtaagggcaatggaccaatcgaacccggccggcctgcggaatcaaataaaggatcttttaaacaacagccccattggattagtggggcgggccgtgcagacagtaaacggctacatggacggcgggagcaaaaccgaattttcagaatcccttggggcaatcatggatacaatgactgtgtccgagcaccggctcagcacggtatatagtgatttgggcaacaaatatgccattttggaaaatgtggaggataaactgacaacagacaaggtaagcctgacagagcaatacaaaaacaagctgggggcggatccctatgattcaatcattgaaatgtattcctatcagcaatcctaccaagccgcgctaaaggttggttcctatatgataggaacatcattgtttgattttatgcgctgattcccatgttcagactggaggtgatatcatgggaacgcttattaaggttacttcgataccctttgaatccattcgttttacacagaatgcccgtctgattccatctgatagggtggcagcagagcgacagaaggcattgtcccttcatcgcgcataccagcaccaacatcgcggcagggggagctattccggctttgattttataaatcaggtcaggcaggcattcccttccggctcccctgctcccgtcccgtcacagagagccggatttccccagggggtatccgcattccaggctgttcatcaaaaaaacagcctgggttccggcacagcctctgtatccggctatccttctgtctcaatagccagttttacttcaattgatgctgaggaatccgcggcacctggtacagcctccatggagaccgtttcagaatacctggtacaaagagaggcttttgaattccgcatagcaaaaggcgacctttcttacatcccgcccctgtccgtaacaattgtgacacagtaccctgaaattcactttgagtacaccggtgaatttaactatgtacctccccgtaagaacgccatgggaagtgcgattgatatacaatcataaacagcagcaaagaaaggcagacttttcatgaaaacgcaaaccggctattatggagaaaccgaatataatccgtcggatttaattgtggtggcagaaggattctttggcttccctgaacttaaacaatttcttcctctccgcctggatgaggataatgactccctgcttttaatgcagtccgttgaaaactcccaggtggcttttgtagtcattgcgccaaccattctatgcccggattattcccctgtccttacagaggaagatttgtccgcactggatacagaagactgcaatgagctttcctattatgcagtatgtgttataaaagacaactaccttgaggacactgtaaacctcaaatgcccgctggctatcaatcctaaaacaaaagcggcccgtcaggtaattttagaaaataccgattacggataccgccataagctgaataccttttccagcattacaaaaaaaacacaagacaggagtaattgccatgctgatactgcaccggaaaacgaatgaaagtattttaataggagagcatatcagaattacagtgattgagacttcatctatgggggttcgtctggcgattgacgcccccaaagatattaaaatcatgcgggaggagctggccattgcagccaaaacaaacgaagcatctcttctgccttccatccgttccatccattccctgcaggagatattggagcagcacagaaaggaagtccgggaataatgtcaatccggcttcttttttttaaacagattgcttatgagcaatccctttaactgccgaattcccctccatatccagcagattggcaaaagaattgaaaaatcctccagtatgggatagataacgcacatatatttatattccggaaatacccatctcaacatccgtcctgtgtgtttccgtctctttctccacttttcagtgaaagcagccctcttttcccggaactgttccctattaatttcccgttggactaaacgctccagttttaatgcctgctggtccgtctcattgttcagaacacctctgctcaaaatccggttctccagaatatcgtatacttttatatcctcaggcaggccgtcagatgccttttcacctttgctcccaaaccacatatatgcaatctgaaggattttctttcccaattcatcaacccgaaagccctccatccgtttctcaatggattctatattcattttttctttccacatcctgtgaaacacatacaaatccaatacattgcgaattaaaagcgcatctgttacatatgcgtaagccgcgcttgccagcatatatacaaattggttttcaagggaaaagcccctcacatatttatatctgccccaaaaaggcgcggtctccagcataagcttcatatttttatcatacagcctggtgcgtaaaggcagcttataataaatctccatatcaaagccggctgcattcttcatatgttctccatatcccttataagaatagtctgtctcataacccaaatccaccatataccccttggccagcacataactcttttcatccaccaaaagtttaagcagaccgcaggccgacatctccggaaccgggtataattcacggacagcacaggaagaaataacaaaacagggaagattcatcatttccatcatcatcaaaatttcctgctgagcctccctgtacacatccccaaacctcagtgccttctgataacgttcaaaaaatcgttccctccaccgctccggtattttgtcgccgtttcccaatgaagctaaatatatgatattagcaattttatggtaatccgcttcccgaaacattttttcccaatttaccctgccgtacattacccgcaaatcatcctgacgcataatcccgcctactgtattgacaagaaaacggccttcgtagattaatcgttccataaatatctcctattattgaactaaataaacttcctttctctgccttccgaatctgactgcctcctcatgggtatcaaaataaatgtcaatcacattgcctgtcacactctcccctgtatcctctactgtatagacaatcccaccgatttccacttttgtacccatttccagaatgcttggatctgccgccacagtatatccggctcttggtatggtctctgtttttgttaaatatttctccttctttccgcagcacacttcgcagccgcagtaaccggtgatatcaaatacccctaacagcatcccttcatgaatttccttctggtggaatatatataccggaagccttgtccttccaaaggccagagcttcctcatggctgtcaaaaaacagactcagggtttctctggccctggccgacagcttatcctgtacttcgtatacatgtcctccaatccttaacttatctcctatctggaaaacttcaagattggcagccacagtaatcccctgtacaggcctctgcccggaataggtaagatagccgtcggacttctttatacagatttcgcagctgcagtaagcagctatctccatctctcccagatattcttcttcctcagatatcaaagaagctgcctcttggcgttcacccgaaacggatgcgattacatctttctctaatggtacaattgctgttaaatcctctcctgccgtttccgtatcgccattactggtaatcacagctgccagaacactaattacaattaccgctactcccacactgcattgaataccagtcaaaaaccatgattttataccaaaacgctttttcaacattgggttcactcccctggaactcttctttatcttatgtattacttctgtgctgccctgaccgggcagccccatgcacggtttacttcagcttataaaccgtgtctcggcttttccttgacctgcaggcaggctttcagaatctcagtgaaaatcctgactttaaatttattttcatagaatcctatcattggagccaccgaatcctcatggaccacaacatatttggacggaagcctggttaaaatcaatgcctttgtatctgcgcagcagcggctgcatctgcacacaccgtactgctccatatatttttttaaatccatacgcgtaatgatattttccataacattttcaatgtggcattcctcctgtccggaatcatggtccccatcccgcggttcctgccctccgtcctgaggttcccggcctccgtcctgaggttcctgaactctgtcctgcgcttcctgaactctgtcctgcgcttcctggttatccaactgttttgccaaatcatcaaaaatcttgtttgatatattctcctcctgatcatccaccacaactaccatcttatctcccgaggaagataccttttgcacggagtccatgggggctgcttccgtccccgccttttcctgctttttagtgtttctttctccggacaaatcctgtccggaaatttcctccgggtctgcgccattggtaagcaggctcaatacatgagatgtcttattcgttttctttggcatatcccgccgcctcctttaagtgaatcctctctgcaatctcatcaatcaactcctgataatcttttaccgctgctgaacggggattataatcaaaaatgctttccccatgggccggcgcttcagcaattgcaaccccgcttcgtattttcgtgccaaatacagttgttttcatctgcctggccagctgctgcgccatttccagcacatcccttgaaagaagcgtccgcctgttaaaacgggttaataaaatccccagcacatttaattcagggttcagattttcctgcacggattctatggtttcctttaattgtgacagccccaccagactaaggatatcggacgccatgggaatgattaaaaaatcagataccacataagcattcactgtgaggaggttcagcgccggcggtgtatcgataataatataatcgtatttctccattacgggcatcaggacatcgcgcataagatattcttttcttccggaatttccctgctccaggccgctgctgctgagtgtaatatcagagggcaggatatcgcagtattctgtccgtatgatggcttcctgtattggaagctttccttttaaggcatccagcactgtggacatatcagaggaactaagcccaaggcagaaacccagatttccctggggatccaaatcaatccccagcacccgcctgcccctggaagatattcctgttgccaacgcggctgaggtagtggtttttcccacaccgcctttctgattagaaacagttatgataatagccaaaatatttcctccctattctttcgtgtatgttcatatcaaaataaacggactgttttcagatacattttaacgctgccacagggcaagctcattctcagaaggactgcaatccaccttctgttttatattctcctcatttaccggcagcaggtattcagaaaacggcgccccagcctgggtctgcgccatttcagccacgtcctcccattcctctgcatccgcctcatccccgttgacataatacacaggctctccccagtcatcctgttccagctccaggctccatatattctcaaaatcgcagctcccttccttcaggaaaaaataatttcttcccccattgtcctccacgattgtaagataggttaattgttgttccgcattataggtgaggaaggattgctccgccgcatcggggtccgactttgatgagacggccagttcttcctcctcgggcatccacactgctgccagcaaaacacgtttagatgatattgcattgtcaaataccgcaatatccctgtatccgtccccgtttaaatccgccagaagaaaaccgggctgttccatatccgccgcctttttatcaacaaatgtcttcagctgctttgataccttcctgcggtaagtgtcaaactcctccagtatgactccttccggccccacataatggttatccggggtaaagagattaaaacatttcgctccgtcttcccccatgtaatagcgctgcttgtctttcctgtcagttacccatcctgtgcgcatgtatccattggaatccacatagtattcctttccctggtcctcaatccattggtccacagcaggctctccgggagaatacatatatttccaccgttttccatcctcctgaagttcccaggtcccctttgcggccagagaatggaggggggagaacagtgaaaaggcagccacagctgacagaatccggactatggcgcgcttccccttctccatatccatactaccctcttgcttttgcccttttctcttcatattcattgagaagcttatccatcgtcgccaccagacgcccgatctccggttttgccagctggtcatcggctcccagttcctttccttttctccgcatctggtcgtcaatcagagatgaaaagataataacaggaatcttcttaagcctggaatcatccttaataagctttgtgagacggtgcccgtccatctggggcatctcaatatctgttattataagcttgactctctcatataaatcaggttcatccttaatggatgacagataatcccaggcttcctttccgtttccaaaattatgtatgttggtaaagcctgcccgttccagtgaatcgtcaatcattttcctgagcagaacagaatcttccgcaatcacaatgggcgcctcgttcaaaggccggtcccccatggcatctacctctgaaacctgaatggtggtttccggggcaagctccgccacgattttctcaaaatccaaaatagtaaccagctgcccgtcgcactgggcaatccctgtggctatgctttcatccccattggctatggtcttatccggtttctggatatctccccaggatatgcggctgattccctcaatcccctgaacccggaacgccactgtcatcttattaaagttggtcacaataaataaatccctggcccctttttccacctgcgctcccgaaagatagcatgccaggtcaatcactgtaatcagcgtatcccttggtttaaagattccctctacggacggattggcatggggcatggattttaccttctgactcatcataatttccttgacctttgccacattaatgccgtaaaactcattctggattgtaaatttcatgatttcaatttcatttgttccggattcaagcaaaattccttccttttctcttttcatcagttacctcctctataaatgccgctcaggctttcccattgtgcggattgcaacatcaccgctttcaatatccaatatcatggtccttgcaaaggcgccgccggtatcctctgccgaaatcctcatattctcttcctgcagtatcttttttaccataaaagtattcctggagccaatatttccaaactccgcatttcctcggatttcaaacatcttcgcgcctccggcgattttaaccacggttctggattttaccatgccgaaagcgcttaatttccggattgtctcatggataccggaatcagcgtatttataaatattcccctcctccgcgtcatggcgttcaggaagcataatatgaagaagcgctcccagatgtaaaaaggggtcccaaaacgagattccgatgcaggagcccagagcatatgtaataatcttcccggtgcctctggtaaatttcatatctccaattcctaccctcagttccctctcctgcattataagactcctaacttctctaaaatatcatttaaagacttcatatcaggaagcattaaaagccagtctgaaagccgcgtttcatccataataaaatccgagttaaaatacatcagcttatctgtctcatatccgtattccgccataggaaccgtcaatatgccgcccagcatatttacggtggagctgggcactgaaagccgtatatccatcttcaccagctgcgcaaaggcatttatataagaacaaatcgcgatgtttcccacctcttccaatgcggaataagccagatcgtccagttcttcaaaactggagaagcgttttcccagaagcttttccaacagcgtattggcaaattccatgttaaacagaaacagcatcagcccttccacgtccccgctcattttaaccagggtcgctgctacgatttcctcaatattgccaattcggttcaccgcgtcctcatatcccaggacattgacctggggaagggtaatgcgtatttccttttgaagaagtttggaaagagccgtggccgcatggctggtgccaatactgctgatttcccgcatcacatccagttcctgcagcttcagttccccgtaatcatttatcttcatgtccatctcacctttaccgtttattcatcagctttccctatccccgcagagagttaatggtcccctcaatttcatctgatgtaattaccatgcgcagtgcataggaaaatgcccgctggcattcaatcagcctggtcatctcttttgccatatctgttcccgatacttccagggcgccctgtgccagggccggtttttctattaaaaccccttccacgcccccgtccctgggaacatactcctggctgcccgtgctcacaagcctgctgggattctgaaacgtatatagactgacctttggcttctcgtcctcatccgttacttcctcatccctctcatacccttcttccatctccgcccgcagctcttccacatccgtcacttccagtttaagcggctggctgttttggtccaaaaccagctttccggcatctgtcatcagataaaagccatcctcccgctccgcccgatgaaagtgtccgtttctggtataactgactgcccctgttcccgggtcctggaccttaaaaaatgcgttgggctctaaaattgcgtaatcatactgctccccggtctgagtaattcccgcgctgtcaaaactggtatatgtcctttcaacacgtgaaccggctcctgcctgcagctgtgtcaccgcgccgggggaatcattgagattgtagttaatcaggtcggaaaaaacagctgtcttaggcttaaatccattgttatttacattggcaagattatttgcaatgacgctgagcttttccgtgcagcttccggcgccaacggctcccacataaaatgactggttcatattcctcctccttatacccttcctacgtcagatgcagattttcccatgatctgatcgtacattcttaatacctgggccgcactctgaagcgctctctgtgaagacatcattgcagtcatttcatccaccatgtcaacgtttgatttctcaagtgtcttccagagaatctgtgtttcttccccgcttacctgcgcccctgcctggtttgcggagaacagcccgttatcctccttatgaagctgtccgtaatccccaaaatccacaatctgaagcgtccccaaatccatctgttccgcgtttgcgtccgtctgttcaaaggctgtaatgcgccctttatcatccacagtaaaattttcattctgaatccgaatgggctggcccccggctgaaagcaccctgccgttttcccccagtacaagatatccttcagaatccacggcaaaggaaccgtttctggtatactgaatcccatttggcgtctgtatacagaaaaaaccctttcctccaattgcaaaatcatatataccttccgtaggctcatagcttccctgctcataattcacataagtcctggaagctgtacgaatctttgatgtggaggccagcggttcagctgttcctttaccgcgccttccggtacggtaaagcatctcctcctgaaaggtgctggaaaccattttatcccgcttataaccggcggtttgaaggtttaccatattattgctgataacatttaagttccggctctgggtaagcattccagaggccagattataaaatccctgatacatttttgcttcatcctcctttttattatccaagatgtgatttcatgtatgctttcagctttcggatcgcctcgctgtggatttgggaaatccttggctcgctcacatttaagacctgagccacctgcgtcatgctcaattcctctacataataaagagagataaccagcttttccttttctttcagcttttcaactgcctcaaccagtgtttttaccgtttcacccttaaaaaagatatcctccggctgtccctcgatatcatcgcttggcacctggaccgcctgcccgttttcatccccccgtgtaatcatatccaatgaaagtacattcatcatggtgctcatcctctgaatccgcttaaattttcttagattcatcctcaaataccctgctatctcttcatcggaaggtatatgcccctgcttttcatacaaatactgccttgcattttcaatggactgacggttcttgtgataatttcttggtatccagttatttttgcggataagatctatcacggttccccgtatgcgccgcgaaataaatgtctcaaatttactgtcccgttccggattatatcggtcaatacctttcatgattgcaataaccccctcatgaatgatatcttccatctgcataaaatcagagtacagattgttcatttgaattgccacggactttgccaggtaaagataccggagtgttaattcctgttttattccctggtccctgctctcctggtaaaggacaagcagctcctcatttgtcatttcttccattcccttttgcatcttaaccaccttcgctatcatcacatatggctcctggtctcctccagtctaaggctgccgattgattgtatctgcacattgtttgcaatctcattaaatgacagaacacgcactttcggatagaactgctcaattaaatggtaaaaatgtatccgcattacctgtgaggtcagaataaccgggttttgtgtaaggccattaaattttttcatctgttcagccagctggcttataagactttggagaatatccggctgcagggccagatacattccgctctcacctttctgtacagagcctgccatggtgcgttccagctccgtatccagggtaatgactttcatgcttccatcctcgcagtacagtctggtaatggtccgtttcagcgctatccgtatctgctcaataattccgtcaaaatccctgacgggaagacctgcctcagatatggtttctatcatggtttctatgatggtctccaggtccttgaccggcaccccctcttttaagagagccgtgagcacacgctgaaacagattgtaggagataaggcccgggaaggcttcctccaccagttccggagaagtctttttcacattctcgattaagcggattacttcctgtcttgtaacaagctcaaaggcgtgctgccgtatgatttctgaaagatgcgtaaccataacggaaagagggtcaatgaccgtatatccgtacagttccgcccgttccctgtcctccggccttatccagcggctgggaatcccgtaagccggctcaatggcttctattccatccacttctttttccggatgttccggttccagagccaggtaataatccaccaaaagctcgccccttgccacttcttctccctttatcttgatgcagtattggttggtgctgagccctgagctgtccctaagccggatggatggtatcacaaaccccatatcctgcgcatattgtctgcggaatatgacaatcctgctgataagccttcctcccactgattcatcagccagtggaataaggctgtatccaaattccatttctatgggctccaccgtcaatagtgtgtaaacattattgacatccttgaaatactcgtcctctgcaacagcattagacgccgcggcttctgcctgggattcctgaaccgcctcggaatcctgatagagcaccgctcccggagcataggaggcttccgccacttttctggacagataatatccccctgatattaaagccgcggagataataagcagctgcagtacaggcatccccgggataaaagtcaggaccgccattaccacaccgctcatcataatggcatagggctgtgacataaactgtctggagatatcctcattcagactgccgtcagagacagctcttgttacaatcattcccgttgaaacagatatgagcagagccgggatctgggacaccagtccatcccccacggttgcaatagaatatgtatttaataccgttccaatgctgcctcctgactgaaggatgcctatgacgcttcccccgattaagttaatcgccgttgtaatcagggacatgacggcgtctcccttaactatctttgtggcgccgtccattgcgccgtaaaagtccgcctctctctgaaccttttgtctgcgatcctttgcctgctgctcgttaataaggccggagctcaaatccgcatcaatggccatctgtttccccggcatggcatccaggttaaatctggccgctacctctgcaacgcgctcagctccttttgtaatgacaataaactgcattaagacaataataaggaaaatgataaaacccactaccacattcccgcgaaggataaaatcaccaaaggcttttataatctggcctgaggaacctccattggaaagaatgttccgggttgtagaaacattgatgccaagcctgaaaagagtggttaccagaagaagggatggaaaaattgaaagttccaggggttcccggattgtcatggtagacaccagaatcatcatggaaagagccatatttaatatgattgcaacatccaccattccggccggcagcggtataattaataaaagtatgatggtcagcacaaacagcacaaccgtgtaattaagtatctttttcatgaaactaactccatcctggttttattggaacatgtcttccctgtggctggccctgtagatatatataagtatctctgctaccgcgccgtaaaactccgcgggaatctcctggtccagcctgcaggaagcatataaggctcttgccaggggtttattttcaatcataaaaaccccgttttccgctcctgcttttacaatgcgcagcgccagctcatcctggccttttgccaataccaccggcgccccatggcgctttgggtcatatttcagagccactgcaacatgcgtggggttccttacaatcacatcagcctccggaaccttctgtatcatcctgctaagggccatctgtctctgaatcctgcgtattcgcccttttatttcaggattcccttccgtctgcttatattcatccttaacttcctgcttggtcattttcagattcttctcatactcccatctctgatacagaaaatcaaaaaatgccacaattataaataccatacagaccttgagaattaactgaaacgccatttgaagcaaatggatacatgaattcaggggctccacatcaatcatccgggccacctgtacgatatcacctttaatcaggttaaaaagcaggactcccagtactgctattttaagcaggttcttcagcagctccaccgcatttcttacagcaaacattttttttattccactgatgggattaagcctgtcaaatttaggctttaatgttttaaatgatatattaaaacgcgtctggaccccatgagccgcaattcccagagccatggaggaaaggagcagaggaaggctgcattttaaaaatgtaattgctgtggctgcaaaaagcctgtatgccaggacagactcctgttccaggctgatactgtcaatcacaaacttcatataatcccgtatattgcggtatataaacggcatcagcagccgcgtcacaaaaaaaatccccaaaagcattacaaccgtggcaatatccttgctctggaatacatttccttcttttctggcatctttacggcgtttactggtaggctgttcggtcttttcctgtccgccgttatccgccacccttcaccactcccttctccggacaattacctcatcatcagcgccagcctccaaagtgaccggaacatggtatctattatcatgttcagcttatccgacatgggactgaataaaaacatcagcatcaaaattcctacaataatcttcatctgaaaattgataacaaacacattaatatggggaatcatacgcataataatccccactgccacttccgctaccaattccattgcaataagaggcattgcatactgaagccccatcaggatgctgtcctggaatatcttcaataccgcttccgacagctccggccttattgacacagaaccaaagggtatgaaacgggccgcggcgaaaaaaatcccaaacagcttcaaatggccgtcaacagcaaaaaaaagcagcatcaaaaatgcgtagtacattcctgatgtaattgtcatctgggagttgtactgaggatcgtaaatctgcgccatgttaagtcccatcatataatccatgacagacgaggcaaaacggaccaccagaacgcataattccattccaaagcctaaaataaacccaaataacagttctgacgccagcatcacaccgtattctatcagactggagggttcgcgttccagagcctgccccataccggcgtaaagcataagcgaacatacaaacacaaaagcggcttttgcagaagacgggaaattgtttcttccaaatatggggtttaaagcaattgccccgctcatccgcatgacgatcaaggaaaataatataaacatcccttatcatcctccggctattatttcaaaaatcatcctgacaaaatcctggagcattaccagcatggaactgcccaacactccaagaagccctaaaatagccagtaactttggaacaaacgtaatcgtctgttcattaatctgcgttgctgcctgaaaaatagcaacaagcacgccaactgccatgctgatgatcaaaaagggcagcgacagcctcatcatcagctgtaatgcctggtacatcacatccaatacctggacgttgctcataattacctcccatccggcctgcctagcggaagcttctcacaatactggaaaacagcagttcccatccgttaacagttacaaacagcaaaagtttaaagggcaatgaaaccattgtgggaggcagcatgaccatccccatagacataagcgttgtggcaaccacaatatcaatcaggagaaacggcaggtaaataagaaagcctgccataaatccgcgcttcagttcactggtcataaaagcaggagtcactatggtcattggataatccgttacatcctcccttatctctgttccggacatttccacaaaatgatctaatgtttccttttccgtgttgcgcagcatgaattctttcattggaacagacatttgagccacagcctcctcctgcgtaagctctccccgcagatagggctgatatgcggtctcattgatttgtccaataacaggacccataatataaagggtcaaaaacaaagaaatcccggctaacaccagattgggcggggtctgctgaatccccattgcatttctggtgaaagaaaggataatgatggttcttgtaaaagaagtcatcatgactacaatggatggaagcagcgccactaatgtaatcataaaaatcaattccagagccggtacattgcctccattaagccctgtcagaagattatccattttcttcctcctgctcctttcctatacgggcttcatgttctcctttaaaatcctctcccagttcagccagcagctgaatccctgcctgactgactccaatcagaaacactctctccctcatcttcataagaagaagacgctggtctgtccccagacgtatttgttccagaatccttatattttggtctgaagacgctttcatataacggctgcccagctgccggctgaaccaccaggccagcagcagcacaagaaccaccataaatatggcgctgaataatgaaaaaagttccataactataaaatctccgggtttaaattcctggcaatgatttcagtgatacggatgccgaaattgtcttccaccacaacaatgtctcctctggcaacgcactggccattgacatataaatcagcctgctctcctgccattttgtccagaactaccagggagccctgggtcaattccagaatatccttgaccagcttttttgtccggccaatctccacggatatttccaatggaaccttcatcagcatttcctggtttacggtctcctcctctccgtttaaggcgcctgcctccagcggcttattttgggcaggatgaatcagcgtgctttcccggcttcccttttccttcatatccttcatcagttccaacatctgcatctgagactgctgcatctggtttatcagctgcagcatccctgaatccaccggcattgactgatatccgggagttaccgtaaaagcggagggtgatactgcgggctgcggctgtaacactggctgtgccgatggctgcggctctgccattagctgcggctctgccattggctgcggctgtgccattggctgcggctgtgccattggctgcggctgtgccattggctgcggctcctgtaccggctgctcctgccgttttgttgacagctcttttgtctcttccgctgagtccggttcctgaattgccccgctatcttctggttcctccgcgatttggctttcattttctttcaggctttccgtaaaaggctcaatcaaatgctttaccaaatcagtggacataatattcaaaaattcatttttcagctttccttctatttcaagcaggaaatgtaccactaccatcttttcgccccggggaaagaatcgctctttaaaccactcttcactttccacaggaaaagataccggcgtggatatattaacggcatagccaaagaactcagaaagcgcagttgcggatgaccccatcatctggttcataacctcgcatattgcactcatattaatctcatccagttcaaattcctccgccggtatctccgcccccatgagcatccctacgataatacggacatcattaagggcaaacatcataacattattgcccgttaatccttctacataggcaatctcgacccccaccgccggttccagttttttaaaatcaaactcatctctcattaatacccggacagtaggggtggtaatatttaccgtttcgccaagcattttagatacggctgttgccgatgcccccagactgatattcattatctcgcctatggcatcccgttccatttccgtaaaatcacaagcgcccattgtttgtctccttttgctctttcattttcttgccatacctctatttccctatatccagcgctttctgagccataaccttcattgcatttaatgccgtcacatttgcctcgtaggatctggtagccgacatactgtccactgtttcctttaataaatccacatttggataattcacatatccctgtgcatctgcatccgggtgtcccggattgtagacccgcttcagctctctgtcatcctcaataatacctgccaccctcacccctgcattcctgcttaaaaatcccttgcccagggaagcactgcgcaaagcctcccggaaggacccggccccgtagctctcaaacagcacatcttttcttctgtaaggccctcctgcctctgtccgcgtggtgtcaatattagctatattttccgctgcaatatccatccggagtctctgagcgctcataccggaggcggcaatatcaaaagaacttaaaaacgccatctgtatccctccctattttccaaaaatggaattgactgtctggacaatcctgtctgcattaaacggctttacgataaaatcctttgctccggattttatggcatccaccaccatgctttcctgtcccattgcagtacacataacaacttttgcagacgaatccccctccttgattttcttaagggcctggaggccatccatattgggcatggtaatgtccatgataaccagatccggcttttcctcctcatactttttcactgcttctgccccatcctgcgcctccacaaaattactgtaaccgctctttgtcaaagcattttttatcatcatccgcatgaacgcagcatcatctaccaacataattttttccattttttcatcctcgctttaatttgtattttcttgtctaagatgcccttcactttccccgttttcagcttcctcataaatctgtttttcaatgcagacagctatgtttttcttataggcccccatctttccggtaaaccagggctggcggcccacaaaaatctttacatttccatccttgggtttgttcatggaaatgacatctcccactttcaggttataaagggtctccagctccagttccacagtgcccagctgccctgttacagggagcgctgtatagcgcaggttatccatgattacttctctgttgtcctcataggaatagcctctggcaatatgcttgcggctgtcaatcagatggaacatgtactccagcagcgtgcctggaatgcatatttttatcttttctaccgccatgcctgccacatccacattgagaagtatgatcgccacggtctcgtcaagaccgatttcctggaccatgcttgggttttcttcaattctttgtacctcaaaactggcattgatataattggaaaaaccgtcttttaacgcctgcacaaaatacttcaccactctccggtataacgccacttccacatcagaataatggtaattttcttccagcttcacgatttcatctccgccgcccagcatgtggttaatcagtgtgatgaccaatccgggagtaacatacaccatgagcggaacattattctttcccttgtcagaaatctcaacatccgccaatgtaatactgtcattttcatgaagtgaattgacgaactcatagtatctgcgctcctgcacttccatcacggttatgtctgtaagaaccctgaatattccgtttacctgagaagtcagaatacgggcataattttcaaagacgctgttcagtatttttattttgtcctttgtaaactttcttggactgtagaaatcatatttactgtactttgtctcttcggcctccagcttcttttcaactgactgttccatcttttcaggaccatcattctgcattgatttaagaagcgcatctatctggctttgggatagtacatctgccattgctgaaaccacctttactcttttattctgatgtctctccgcctgcaaaagcctctgtgcctgagggcggcattgtgctggctatattctcaggcgagggctgtgtctgtgtaaacccagagtcagcgtccccgttctgactgcctgtcacaacggtcttgtctgcatttcttccgctgttatactcttcaatatattcgcttatggaacgctcggccgtgccctcatcaatcagcagcatctcaaccctgcggttttttgcccttccctccgaggtgtcattggaagccgccggcctgaactgtccatagctgatattgactaatttctccggtccaatcacattcttttcctgtataaaggtgcacacctccgccccacgcatggctgacagcatgcggtctacacgcggattgttaagccgcctggggtctccctgagccgtatgggccataatattaagctgggacagcttatcactcaccgggctgattgccgagcagaagtcagccagaatcctttgtccggattccgttatagcagactcatttccgttaaagaacacattgtcgttaaagcttacgtatgtgtatccgtcccctcttgaaattgtcacgccctcagccccattctcattcattcgctgggcaatggtcagataaagcttatttaaatcttccgcgtcatccgtggtgagttcatccggcttcataccctctaccgctgcatcagggtcaatgattccgccaacgtcaatttgctcctgagcttccttcacatcctcagggtatatactgcggacaaagatttcccatttctgttcgcttaaactggacatggaatagagcatgataaaaaatgtcaacagcagggtaaccatgtcgccgtatgtatccatccagtttccgcccccgtctgtgggacggttccctttctttttcttcattgttactcacctgcctctggattgggggccttttctgcttttgccagcagcttgcgctgaacggattgtttcgtggaagccagaaggtgctcccgcagatattttggattttcccctgcctgtatggcaataatcccctcaataatggtggagcagtaaagctcctcttcatcattgcggatacgcagttttttagcaattggatggaaaaacagattggagagaagacttccgtaaaaggtagtaataagagctaccgacatatcctgccccagattggaagcccctccgcttccatccagattaaggcctttcagcatgttaatcagtcccaccagggtacccaccatcccaaaagccggagcataagcagacgccttttcatacagcccggccgccgcgtcatggcggaccatcatgttttccagttcccgctccagcacaaaccggaccttatccggatcattggcatcgacaatcatcagcacactctgtttaaaaaacggattttttatttcctccgccttctcttccaaagccagaaggccgttctgccgcgccaccatagccaaatccaccatctgctccaccaatgccggaatattatattttcttccccggaacaatattaaaatatgttttggtatatccagcaggattgatagaggatagctggcaatggtggcggcaagggtgcctcccaccacaatcaggatactgggtatatccacaaaatttccaatcttatccatcccaattccgttgataaccagaaaaataccgcatacgattcctattaatgttgtcaaatccatacgaaaatgcctcctgtatcactgcaaaagatgaaagcagcaatccctcataacttcttttacctgctgggtaatggattctgcgctgtccttcacaagataaaacgttccattcatcatcttgatctttgtctcaggtatcatttccacggattcaatctggaagaaattaagtaaaagtgcctcaccattcaaacggattactttaatcataacattctcttttcgcccttatcctcccagggccgccgtcagacagccctgagaaaagtatttattatcgtttcatactgatcaggtctgataatatctcatcgctgacagtaatcatcttagtatttgcctggaatcccctctgtgtcgtaatcatttccgaaaactcctttgccagatccacattggatgcctccaggtaaccggtcatcaatttagatgtggaaccgcctgggatggttgcggaacaaaggcccgtattatcgccaatgcttgcggagtaataggttcctccgcttttcataaggccttcctgattttgaaaggttacaatggctatcttccccaaagatacctggacgctttcgccattgtccgggttcgtaacagtggctgtaacctctcccagttcattgattttcacactggctgcctgaagcgcatcatcatcaaacccattgctcaaatcagaggggaccctgagcgccactaaactgcctgtctcaaaccccttattgccgtccgggcggaatccgtatataaaattcgttccatcggtaaggtatccctgactgtcaagctggaactgccccacacgtgtataggcaaattccgctttctttaatgcatctgtcacatcagcggcatccccgtctacatcaatctcttttgttgatatggcctgggttgcaaaaaaaccctgaccattaatacatgcgttcagtcctcccacataggtaggtgtgctggaaagcatatctgtactgatggaacccatcatactgccgtatccatactgggctccgtttgtaccggccgccgttgtgttgccatcttgaactccgcctgttgactgggtggctgtctgatacatggcctccttaaaactatagctctgagccttaaacccgaaggtattcacattggcaatgttgtgtccgattacatccagtttgttctgatgtgcccgcagccctgatactgctgaatccattgctcttaacatcttcaatcttcctttccgctgtctcaactattgcacttccggcacttcgccaggcatcctttcggtcctgcctattttggaatgagaacagcactgtcaatatttgtaaaaattctgtccttcatgtcctctctggacatgactgtaaccactacattattaggtacgtttacaacaaaaaccgcctggcttccaataaccgccaaatccttagccccctttttccgggcctcatctaccgcgtgttccagaacattcttaaactgtccctctgttgcaatcccccgctctataacccgcttcgcggcatgtttggaaaagttcaggccttctactgcttttatctccatattcccttttacctctacgcaagaaactgaaccttctcttcctctcccttatctgttcctccaaatggattatcaatttttcccattcccactatataggaaagagaataatctgtgccgtcatccgcaagcctgatggtggggtttcctcccactaggctcactgactcaacaattccatatttcacatccacggccaccggctgtccatattcattttcttttgtcacggcaactgtaatctcctgtcccaccagcccggctgcgtaggtctgtgttgtaatgttcatagaattatttacagcgtctgtcattgtgccaatagactggaccattgccatctgcgtcatctgcgccatcatctcgctgttgctcatgggatttgtcatatcctgattcttaagctgcgcagccagcagcttgaagtagctttcgattgtcagcgtattcttctcattggaagatgctgtatagtattgtgttatgtatgggttatttgtgccgcttactcctaagctattatcagccatttttcctccttatcagaccagccccagtctgacctgttgtataaaagactcggactgctgtttttttctgtctttttgctgcttttgttcccggtcctctgacccgcgttccctcccggattcctcaggataggcttcctgctgcggtatgtaaacaactgtctcctggccggttttttcctcaagcattcctgcaatgctgcccgcatcccggctcaggatttcaagtgtcctgggattagcggacataagcgccactgatgccctgtctgcgtcgtaggtcacacggacaataattctgccaaggctcgccggttccagttcaatggttatctccccatttttctgcggcatcctgttggcaatggtttttccaacatctgccgaaagttcctgccgggtcgttctgactgtctcagcatgtccggccgcctgatgtacggcgccctccgcccctttactgccttttgcggcggatgcaaaatgtgcttgttccggcgcttcattctcccttccctgacccgcctgccccggccggcctgcttcttccttttttgaggcaatttcagttatttttccatctgcctggcgggacggttcatctgcctgtgttttgatgccttcctgcaaagccctggccttttcctgccgcagcacatgggaatcctgcccagctccggccttttgaagtttttctgtcccatccatgggaagtcccatatcagccattgtctttgccccctttgtttcctgttccgcctgaagcattttcccggggacggcagcttcctccggggttgtccggttttctgcaaatatgccggacgtatttccttcatctgcaatcccgctttgctgcgccttcgcagattccaggcccggtactgcttcaccctgttccgaaaacagcccttcacacactaaaacaggctggttcatatcccattcaaaccttgccgcaaaatcatggcgctgtctcagagtctggaattcatcagcatccggctcctcctttggttttgttttcccgccgtcctgcttttcccggatttttccatccggccggggcaatccggcatccttcacatccgcagcttttgcactgagcatgtgggaaaaatccgcatttttcttcccaggtggttttgatggattggacagcttcttatcctgccttatcatccgcaccatctcaatattggccataagcgtttcctcctcattattatttttataattaacagctgctgctgtaattaccagtcttatccccggttctggctgcggtttagcaccgcgctccggattacaaattcttcggaaaaccgttcttccgctctcatcagctctttattatacgcggtctggcgcctgtccttcagcttctcaaatttggaagtgtctatcttagcttccacaacctccttctttttgcattcttccttttcccttaaatcctcaagccttttctcttgttcctccagaatttttcccatccgttcaatgcacatatcatacaggcggtaatgttcaattaaggcccctgccccctttgtccggtcaaatgcatcttcataaccgctcaggctgctgtgggcacggatcacttcttcctcctggcggacgacttttctgttaattgcagcgtgttctgttcttaaatgttccaatgtctgcatcttataatcaaggactgtatccaggccaaaccggaactgtttcatggtattgtctcctagccggtaatttctttcattaattccaatgtctcatggtattcaaagctttcatcaatgtcctgctccaggaactgattcattctgtctattttagaaaccgcctcatctaaggctccgttgctcccttttttatatgctccgattgatataagatctgcgtttttctgatacagccccatcatattccggaaacgggaggcagaaatcctgtgttcttttgaaactacttccaccattaatctagatatactggctccaatgtcaatggcgggaaaatggttctcacttgcaagctgccggctgagcacgatatggccgtccagaatcccccggaccgtgtcggaaatcggttcgtttgtatcatcgccctccaccagcaccgtgtatactcctgttatggagccctgattaaaattaccgctccgctccaaaagctttggaagctcggcatagatagagggcgtatagcccctggcaataggcggttccccgatggcaagcccaacttcccgctgggccatggcatagcgggtaagggagtccatcatcaaaagcacgtcatttccccggtccctgaaatactccgctattgtagttgcgaccaaagggcatttcattctgagcatggcgggctggtccgatgttgccaccactaaaacagaccggttcattccctcttctcccaagtccttttgcacaaactccaggacctcccgcccccgctcccccaccagcgcaatcacattaatgtcggcctttacatttttagcaatcattcccatcaaggtgctttttcccacgcctgaacccgcaaaaatccctattctctggccctttccaatggtattaagtccatcaatcgccttaactccaaactccaggcgttcccggatcggcggccggcttaagggatttgtataggaactgttgaccgtataaaaccgggttggctgaaattcctcttttccatccagaggttctcccagggcattgataatcctgccccgcaggaaattccccaccggcaccttaagcctgcgccttgtgttgcgcacaaagcttccggaggttatcccgctggtgggctcataggtcataagctggactttcccgtctttgaagccaacaacttctgccggcacctgacgattctgctcttcgttataaatcatgacaatatctccgatgccggaccggccgccggatgcttctatggacattcctaccacattttcaattttcccaatgtgacttacgacctctgccttagccaccatctgagggattctcttaaacataagcgctcctaaactttgatattttccagcaattcccttatattatccatctgggtatccacactgatatccacgatttcttccggcatttcaatgatgcagcttccattgctttctttattcatgactataaatttgatattgtccgacagcctggccagttcatttacaacgtccgcgtccgcctccatcatcatgttgtaatcgcttttctccatgtatatttttacccatgcggtccgtttcagtttttctatttctgaaacaagcattctcttgataatctggccgctggatttaagactgacgcaaatcactttttccgccacggcaagagagcagtcctttaattcatcaaggtatttctcaagacttctttccttggcagcatcaatggagctgagggcgttctccaggctgctgcgaaacacctcctgctgcgcgctcatcaccttgctgcttttttccatgctctctttccggccctgctcatatccctccctgtatccctcttgcctgcccttggaggcggattccttctttaccctgtctgcgttttcccttgcttttgcaagaatatcttcagcctgcgcatttgcttccatgaggatttgccgggcatccgcttttgcttcctctatgattgctccggcctcatcaagggccatgtaagccgccgcctcctgcggctcctggcaaggaagatggaccgcttctgtctttgtccccttttcctttactgacttttttgcaggaaaagacatctggacaggaaaagaaaaggcttcgaccttcgcctcccccggctttacaatgcctttaaacgatgatgttatcatcctcgcctcccttctttataatgacctctcctgcttcttccaggcttcggataatattgacaatgcgctgctgcgcctcctcaacatccttaagccttacattggtggtaacctccaaatctccctttacagtctcggccatacgcttggacatattggcaaagaatacctgcttcatctcatccggagcgctcttaagggcatacacaatatcctttgtatcgcagtcacggacaaagcgctgaatggacctgtcatccatatccagaatgttctcaaatacaaacatcctggacctgatattctgtgacaaatctggattatgtttatccatctcatcaaaaatacgtctttcactgcttctgtccacattgttcataacatctgccacaaaatcgattccgccaagattcatattgtcctcgctggtgataatggttgcaaacttacgcttcatctcctcctcaacaatggcaatggcctccggggaaaccctgtccatattagccattttctccaaaatcggaatccgctttttatccggaagctgctccagtaccagagcagcctgcttgggatccatataagccatgataagggcgattacctggggacgttcatgctgcagcagagacagcagcgctttcggatctcctttcatgaaaaaattaaagggtttggactgcaaggttctggaaaccttttccaaaagacttctggctgctgtttccccaaatgccttttcaagtacatttctggcataatccagtcctccgtctgacatcatcttgtgggtcagacacagtttatagaattcatccagggaattttccacctgactgttggaggtttttcccatcttcgccacttcataggtcaggtcctcaatatcctgctcgctgagatacttgtaaatctgcgaagcccggtccgctcccagggacacgaccacaatggcagctttttgcctggtatcagtaatgatatctgtctcatttttcttttcttcttgtatcactgccttttctgccaatgtcctcgacctctcctctcagccaactctgcactaattttgcggcaatctgcggattctgatccacaaaatcgccgatattctgtttcagcttcatactatgctgcatgcgaaggttaatgatttcttcgttcctgcgcatctcatcatcctgtgcgtccacctccgcttcagctgcttccccatcagctattccaggcgactttccagccacaaactcctcctctgtattttccacaaggtcgaacagcccgtccatgtccgcatccccggcttttgccttcttcctgcccctgccgcggattatgagcaaaagaatcagcagcacaagcagcactatgcctgaaataattgcaatcaccaccggcagaggaagattcaaagcctgatccgtctgagcgctcaccggccgggcttctgcaccaggagactggcccgcgccgggcgctgccgcacgcacgattgcgatgttctgctccgccgcatcctggggaatgcctgcggagttggcaaccagctttacaaggtcattccggcttacggacatatcatccgtattaatcacaattcccaccgtgatattttccagcacccccggctctacctggcgctgctccttcactgtgttatacagccattcccttgcggcgctgctgttagtatagttgtccgccaccgtccgggtattatcattatttgtatacctgggcgtatctgcattggcgtccgcgcctgccacacccccggcagacatatctgctgccagcgaattatcatttacaacatcttctttatgtagcagaccggttttatcctgctcgtcaatcttatccggagtggaatactgtgtattctcctgaatcagcttttccatgttcagggttcccttaaccgagacagccacgttcccctggccgtaaagcttttccagtacgcgccgcacatttgccccgatattgttttcaatcaggcttgtaagggcagtcaggtcctttgcgccgcccaggccgctttcgtccgcgctgttgtccccaatctccatcatggtttccgcatcaaaaacagagacgctggtaaaattcatcccctttacggcgcgggcaatcaggttctttatggccgccgctttatccggcgtaagggcctttccactctccatggttaccacaacagaggccgatgcatccgtgccggtctggtcagaaatagcgtatttctgctcaccagcctctgcgattgttaccttcgcatcccttactccctcaaacaaacgaatctgggcgcccagacggtcctgcaagtcataaagcgtatactgctttttatctgattctgttgtcatcaggcccgcgttatctctgtacatatcataggtaaacccgctcttgggatacccctgactcaaaagtctcgctcttgtctgatccacattttccttggtgacctggattgcaccctctttatcattaaaccgatagtcaacattttccttttgaagaagcgacaccacctcctgggcttcctcctgattcaggcccgtgaaaagagtgctgtattctggctgccagccaaatttaagggctataaccgcaaaaacaacaaccactgccgtcactccagtgattgtcattaacattttctttgatttatccgacaatttctgccagttttcctttagagtgtgcattttccatccagccttctgccattattggtttgaactatacgctcattttcatgatttcgttataagactccattgccttatttctcaaagcaaccagcacctcaacgctaagtgctgcttttgcctcagcaataggcaaagaatgagcatcgtccaactgccctgtggccaaaagatactttttattctccgcgtcttcctgggtaatgcgcacctgttccacggcgttttccaatatgttctgaaaaagggatttcttttccccaaaaacatttctgttttcagcagaccctatacccggcacggagttccgctcctccattggcctgataaattctgctgataattccattgataattccatcctctgtttctcctgttaattgaatttaatgggcaatgcctgcttaaaaagttttggctgcagtgcgcagacggttcaattcactgttgattgaatttgccgcctgctgatactcgtaggccgtgcgcacaagctccacctgctcctgatccatgtctacattattgccatccagacgggtagcttcattccaggttgtgcgcagtcctgctctgcttgacctgatggcttccgctattgtgctccgggtcttcctcccatctgcgccgccggcattttgaatcttttttgccaattcttcctcaaacgttacatactgggctttaaaaccaggggtatccacattggcaatattatttaaagtaatgttctgcctcccccataaatagtccagaaccgtttccgtaagccctattccatttccatacaatcctgacacattaccactcctttatatttcaaatttcaacattttatatagcaacaatcaggccttatggttatgaaaccgccattaacaatctcattttaaaaagtactgactgatgtatattgtaaaaccgtacaaaattgcatctatacaagcacccgatatgagtatttttcccaatcaatattttaaggctcaataaaaaatccacctcatctatgacataatgtggattatgtcatagatcatagctgggtctaataattttctgtcgaagctttatgcataaattaataataatttaattattattaacaaattttagggattttaaaaatttggggttgcaatcctaagataattgtcatatcatgatattagttgcaccgtgccgtctcgtggaaccaattaaagtcgtgctgtaaaaacacagtagcaactaaaaaatacggggaaaaagtagggggcttcccatacttttagatgtggcagaagccactggatatatgagttgttctgttgtttgtatattttgaagcattaattacaatatgtaatttttctattctatttttttatgacataatccacattatgtcataatgccaatctatcttgaaggttttcactcttatcatcaaacacaagtcccagttccaattgcttctggtaggcctctctgctgctgaccatggtataacgcctggttgtttccacgctgctgtgtcccaggaagtcagccagccggacaagatcctttttctgctcgtagtaacagcgcgcaaacaggtgacgcagattatgaggaaatacctttgtttccgccacctgggcctcaccgcataattctttcatccctgcccagatatttctcctgtccattggctctcccttgtctgtaacaaaaatactgccctttttaatctttttcttgctgcaatagtctttcaggacaatcacaagggcagcaggcaatggaataagcctgtatttacccttacagtcgatttccaccatttggcctttcaatgattccactgtaatatatttaagttcactgacccgaatccctgtggatgcaatggtctgcagtatacagctcagctgtatctttttctgcatattggccgctctcaccagttttttatattcccgataggaaagttcccgggattcatcccgaaaaaggcacctctgcacccggcaaatattcacggaacactccggccttccaataaatagcagataactgtttaaagctaccagcatggaattgacgctggtaatcttatattttttctgcaggtatcccttgtacaaaagcacctgttcccgtccccaggcatctgttcccgcaaattcaaggaaacgtctggcatctctaacgtatttttccaccgtattcttgctgcgctccctgtcacgcagccaagcggcaaactgttccagtttctgctcttccatgttgttttcctcctagtactgtaatcagttttgttattgggttatctttttattatagtatacccaataatggaagtaaacccaatttccaagtttagtaaaaggatggatatcaactttaactggaagactgccggaaaatcccggcattttcacacaaaatgccggagcgtattttttacgcttcggcaaaactggttatttcaggaaactgttattcccgatttctcagccataaaactcagccatttttcccgcttcatcatggaaatttagtatttgctcatgtcctcccgtgtttcccttctcttttccgctgtgtacagctcacttttatttccagcgtcctctgatatccgaaactggtttaaaagagacttcataacattggcctgcccgctcagttcctcgcttgccgcagcgctttcttcagatgtggcggaattcatctgcaccactgaagatatctgcttaacgccctgggagatgtttgcgatagcgtcagcctgctgccgtgaggaatccgcgattttttctaccatatccagtatctgcgttgtctgattagccatttcatcaaatgccgcatctgtgttggctgccagttcctctccattttttacatgctgcagggatcttccaatcagctctgtggtattttttgccgcgtccgctgacttctgcgccaggttacgcacctcatccgcgacaacggcaaaacccttgcctgcattccctgcacgcgctgcttccactgctgcgtttaatgccaaaatattggtctggaatgcgatatcgtcaatcaccttaatgattttttgaatatcctccgaagcaactgcaatatcttttatggccccaagcatctgtttcatttcatcacggcttctgtttaccacctcgctggctttatgccccaccacattggcattttgggcatattcagcgcttttagaaatctgttcggatatttcgttaattctgtcggacaaatcttccacgcttcccgcctgctcggtggctccctgagccagggcctgcgccccgctggcaacctggccggcgcccacattcacctgttcagaagcagcatgcagctcgcttaacacatcgcttatctttgagcggaaattcctgaccgaaatttttatattcttgaaatcccccaggaattccacatccgtggcacaggcaaaattgccctttgcgtattctcccattacatagtctatggtttccacatacttcagaagctctttgaaggaaaaattcatgcgctccaccaggctgccgaattcattgtttgcctggtaatcaattgtacttttcaaatctcccttggaaagcccgatcaccacttcctccaccttcttcacaataccggtaatctttctggttgtgacaactgcaaggaaaaggcttcccaccagcacgataaggaatgtgaaaatgcacagccacctgaagattgtaatttcctgcagagatgctttttcactttcattcctttcctgggttgtggctgcgtcgattctctgagcgatggaagagagactgctgagaaccggagagcattcattcaatataatctgctttgcctgttccttattgcccctttctatctccgaaaccgccctgttggcaatatcaacccactggttaaacgcagcctcatactctgccgccagcccgtcccgctctccgtgaacgcttttaaactgggctatcctctccctggcagccgccaggcttgcgttaatctcagatttcaggttttcctccgaggccctttcttccgtcagcatcatctcccgcaggtcccgggctgcaacgttcacattagtccggcagtcctttatggcagtatccgcggcaattatattgtccaggagtttattggtgctgctttcgattttccccattccgaacacggaaacagccgtaaggatgcctcccaggaaaataatggcggaaaatactgctaacaaataagatttcagtttcatcttttcaaacataatggctctcctttatcttatgatttatagaaaacactttattttatatgtcgtcaaaaaatggaaaaagttaagaaaaatttttacattttttcatcagcctggcgctgtccgccgcgccggccacataaatcctgcgcgccagttcatttccattttccagcgggcttatgtattggctgtaaagataccctgcctgttttgacggaaccacaagaatatctgactgcagggacgctgggcttatacagtcttctttctttggctctgcgcctccttcccagtggggaaggtagattacaatctccgtgttttccctgaccggcccgaactcacaggccgcttttccccccggtccgtccaggaatacaaaatccggacgttctccggccatacggtatagctcaaaggcctccgcctttaccccgccaaagacatcagggcatgtgtctgaaacacgaaaaagacggcgctgccctttgtcccggaagctgtcccagaagggttccataagatgccatccctcccggcttccaaccagaaacacagccaccagggttccctcaaattccgtttccaggtatttgctgatttctccccgctttccggccagcgctcttcctattttgaagcgtgccctgggttcctgctccgtcaggtactcatagagcagctcgcagtattcctccagcattgccacggtctttgttccgtatccctcttcctgttcaatgatttttccaatggcaatcgctgaattctgcatatcctcaagcagctgttccagcatatccgtattttttttctttaccctggaatccagtagcgcttccccttttccaagggtggcaaccatttcccgcatcttctgtctcaattgctcccgcatgttactgccgcctttcctcgctgtttttatttatatcggcacttttccacaatccataactattattttaattcccatatttttttcttattcttttctgttttttgccgataaataaataaagctttatgattttcaactatatttaacgaaagtggtgggaacacaatggataacggcatggataatattcttgatacctatctgtatgaatccaattctctgttggatcagctggatgaaatgctggtaaaggacgaaaaagaaggggacttttccccggatgatgtgaatgaaattttccggatcatgcataccatcaaaggctcctctgccatgatggaatttaattccctttctacaatcgctcatcatattgaggatttgttcttctacatccgcgataaaggaatcgagtccctgagcccggagcacaaaagggaactgtttgacctgatgttcaaatcagaggactatttaaggagtgaggtaggaaaggtggaaagcggttctccgctctctgataacattgactcattctcatctgagatcaatgaatttctcaaaaaaatcagtgctgaagaaaacagttccatggaaccaggagcccaggaggcttctgtgggtccaaaagccagggcggatgcgcctgccctgccccaggaccccaaagcggtctgctttttccatattttcctggaggaagggatagggatggaaaacctccgggcttatattatcgtcaatgccctcaaagaatgcggattggatttcagatattatccggcggatatggagagcaacccttccgtctgccaggaccttattgacaacggtttcttcctgtcctttgaaagccatgaagccgccgcccaggcggagggcattataaaatcacagaattacatacggtcctacgaactgctggattccccggaccatactcaggacagggacgttcctgctaaaacccaggattccccggcggcggacaatgtctcactacccgccgcaaagccggcggccgccggtccttccgtctccgcgcccagccattcgccggtaaagcagagcctgatcagcgtcaatctgatgaagctaaacagccttaatgatattgtgggcgaaatcgttattacggaatccatggtcacctcctctccggagttgaaccttctgcccaaagaaagctttgacaactttatgaagtccgcgcggcagctgcgcaaactcacccatgaccttcaggacatttccatgtcgctgcgcatggtgcccatatcaggggtatttcagaagatgaaccgcattgtccgggatatgaagcaaaagctgggaaaagatgtgcgtcttaccatcataggtgaagatacggaagtggacaagacaatcgttgacagcatacaggaccctattatgcatattgtccgcaacagcatggaccacggcattgaggaaacccaggaggaacggattgaagccggcaaagcagcccagggagagatcattctcagcgcttcccacaccagcagcgaggtagtgatttctgtatctgacgacggctatggaatgaacgcccaaaaactccttgcaaaagcggctgaaaaggggcttcttacaaaacccgagagcgagtacagtcaaaaagaagccctggggcttattatgctgcccggattctcaaccaaccaggctgtaacggaatattccggccgcggcgtggggatggatgttgttaaaaagaacgtggaatcagtgggggggactatttccatttccagtgaagcaggtttaggcaccacgatcagcatgaagattccccttacgctggcaattgtggacggcatgaagataacggttggcgattcgatttttaccatccctgtttccaatatccgccaatccttcaaggtaacggaggaacaggtgattcatgatgaatacggcaatgaaatcgtagactgtctgggcagcttttaccccatcatccggcttcatcaatttttccacatggatacaaatgctcccaacattaaggacggaatactgatatgggtggaagccagcgactgttcctactgcctgctggttgacagccttataggagaacagcaggttgtggtaaaacctcttcccgcatatttaaacacgtttgaactcaaaaattatggtataagcggatgcaccattcttggagatggaaatatcagcatcatcctggatattctcggcctgtacgctgccgctattaaaaatatgtaattgagggaggttttgtgtcatgtccaatcacattgaaagtcaagcagagaagcagcctgaaattcagacaggaagtccgtctgttgagcgctgtcttgtttttgagtccggagccctttctctgtttatgagtacaaattatgtcatcgaaatcataaacggccactccatcactccgattcccatgataccttcgtttattaaggggattttaaaccttcggggacagatacttccagttgtcgatatccgcctttacatgggtcatgaggaaatggaattcacccgccagacctgcatcattgttctccaggtggactccctttctttgggaatcattgtggattccgtgcagcaggtaattgatattgacctggcaaatgtccgctccattcctgtaaagcggcagcagaagcttttagacggcatggtaaccctggaagacgggcgtgtcctcatgtcctttgactgcaaagcccttattaacgatccgtgctgaaatactacgagaggaggattgattttttatgatcagcctgagtgaagcggattttcatcggatgtatgtttatatacaaaaacattatgggattgacttgtcaaaaaagaagcagctgattgtaagcaggctttccaatacccttgcaaagatggggtacacggattttaccaggtacgtggatgatctggtatcttcccgcagaccggaaatggttacggatatgcttaataagctgaccactaactatacatactttatgcgcgaagaagatcattttaattatctgtatcaaaccgtgctccctgacctggctaaaaagcatgcccatgataaggtgctttccatctggagcgcaggctgttcttcaggagaagagccctataccatttccatgtatctgaaggattttttcggttcccaggcttctgcctgggatacccgaatcctggccacagatatttcacagagtatcctggataccgctcaacatccctcttaccatgaagaaagcctggcccgcgtcccatcttcatggaagcacaaatattttgtaaagaatggcagcggctcctataccattgcgccggttatccgtgagaatgttattttccggccttttaatctgatggattcgattcagttcaagcggccttttgatattatcttctgccggaatgttatgatttattttgatatgcccacaaaagatgccctggtccggcgcttttttcaggctaccgtaccgggcggttatctttttatcggccattcagaaagcttaagcaaagaaaactgcccctataattatatcgttcctgcaatttaccgccgctgcctataatccgcatgatgcaaaaagaagggattttgttatggataaaaaaatacgtttgatgatagttgatgactccgcggtttacagaagctggctcataagctccttgtcaaaaaatgaccgttttgagattgtggggcacgcagtggacgcctttgacgcccagcggaaaatcccgctgttaaagcctgatatacttacgctggacattgagatgccggggatgtccggcattgattttttaaaaaaacttcttccactccacccggttcctgttattcttgtatcctcattaagcataaaggtaattgatgcccttgctgccggagccgtggattatgtaaaaaaaccggatatgggaagctctgctgaaaaagacgcctttttaacaaagttatcttccaagcttatgtttgcctccaatttccatgtgcgcattccggatgatacaaaaaaaacagaggtaaggcctcttagccaggcaaaaagccgcggcttctttcatcctgtaaggtcaggctcaggcagcggcatgatcatcgccatcggggcctccacaggagggaccgaggccattcttgaaattctgtcccgtcttcccgccaacatgccgggtattgtagttacccagcacatgccggaaggttttacatccatgtacgcggagcgcttaaaccggcagtgccgccttacggtaaaggaagctcagggcggagaacggattcagcctaaccttgtgctgctggctcccggcggcaggcagatgcgcgtagtacggatggggaccggttatgcggtacaatgtatgaacggtgaaaaagtaagcgggcaccggccctctgtggacgtgctttttgattcagtggcctacactgcaaaggaaaacgccatgggcatcctgcttacaggcatgggggccgatggggctgccggacttctgcgcatgagaaaaaacggtgcctttaccatcggacaggaccgggaatcctgcgttgtctatgggatgccaatggaggcgcataaaataggagccgtatgcgtccaggcaaacttaagctccattcctcaaatagtgatgagccgtctgaccgtaaaatccgggatgacatcatagaccagccatgaaacgcgcaaaaaagaaactaccatcaccgcaattttctttccagcatattttgacagccggcattgccctgtccgccttcacgctgtgcgccagtattttagtatgggcttaccccagccttgtttcaagggctgtctctctgccaaaggagcttttggcacggtcagggcaggcatccgttgaaacggagacggattccaccatggcatcttccccagagcttccctcagagagagaggattcccaaaaaggattggaggagcttatttcctccggggaactgggagaaataaaagattttgatacataccttacggcagaacaggatgagaccgcatactattatattatggacagcgctatgggccctatgatttattacaatcagggagacagccggtgggcggattatttatacggaggcagcgatcccatgcgttcccacggctgcggccccacggccgcggccatggtcatctccagcttttctcctgcaagccttacgccgcctgaagccgctgcgtgggcggcatccaatggattttacgcccgcggtcagggttcatatcacagtctcattacaggttcgctgaccgcatatggcctgaatgtacaaagcgtgacggagcgctcccaagagcatgtatcaaatttgctcaaagaaggttcaattttaatagcccttatgggcaaaggctcccttacccagaacggtcattttattataattacccaaattttagaaaatggaaatgtccgtatagctgatcccaacagctattcaaacagcacaaaggaatggaagctttcccagcttctgtctgaattaaagcagagccgcgacagcggggctcccctttgggcagtcagccttccttccgaaggctgactttttaggtttcagctttctttccatgctgttccattgctttatcaaaacactgcagttctatgccggaacacttctgccttatcaattcttccagtctgctgtatcctgcctctctggcagcacgcattagaaggaggcggtccttcagctgctccatcttatataacctctccaaaaaagcacccacctgctctgcattttcccggccgcctccatcctctctttgaaacgcgcgaagcagcagcaccagggcggacggaatatatggatttgctttcaaaagagcggtgcagtactttacgcatcctcccaaatctcctgtctggtaacagcacaaggcaagcagctcccaggctcccggaagatccccggtgaccaccatcccacaattggcgttcccatgggtttcgagcaatgaaaggcttttttttagatgaaaggcagctttttcaaattcatttttctgcgcataaaacctgcctacgataaaatcaaaatcgctttcctctggcaggagccgcgctgccttttcatatatatccagaagcgctttttcatcgtcctcctcaacaaggattatcataagtttccaaaaagtcattgcgcttatgaaatcatgcctgcttagtttttccggcatcagattaacggctttgtaataccactcctttgccttttgggattcctttcccgtcaaataggaatccccaagatagcccatcaagtgaaaattgtcgggatgttcttttaattccattagaagcagccttatattccgctcccctttttctttgttatatacgtcactgcccgcatatcctgtatgatagattgcaagcaggtccgttgcgtcagccgtatagggcagtattccctccccgcgaagggaaagctcctcatgaatccggtaccggtaggccagcccctcagtccttttaaacagccgtgcctgacttcctccggcaaatatgctttcatcctcccgtacctgaagccatgaggtcattaccgcatagtactcctttttgtcaaaacgctccaaaagaggaatcagctttttggtctcctccaaagggaaatattcatctgcatctaaaaacgcaatccagtctccggaagctttgctgatggcaaagtttttggcagccgaaaaatcatcctgccactcaaaataaaatacctttgcccccattttctccgccagctccactgtcctgtccgtacttcctgtgtctaccacaatctgctcccagacaactccctttccccagcgaagcgccctttctatattgcgctcctcattttttacaatcatgcactgtgacaaacgcatgtcctttcccccttgttttaattcaataaatcatccagcctgcagacgtccagataatcagttccaatcatatccactcccagaagcagccactcttttatttctgacaccttattacaggaaaacagaccggtcttttttccgtatgcttttatttttttcaccagctctggacagcataagctgcgccggattgaaatccagagaatctcctcattcctgcacatgctttcaatatcctgattattgattgacaaatccatcatttctgcctccgacggaatgtcgtacataatttccagccccatatccctgattatgtcatattcttcccatttcataatcctgaggaccagacgctgccgcagaaaggtatttttcatcaggtctctgtttatgatatttttaatccatctcatctgcactttggtactatttctgatatccaaaataaaatatgcatcctctaattctgctatataagaaaccagcatgctccaatccatggtcctataatgcccatcataataattggaatctataaactgctcatatttcataccattggcaaaacccggctgctcagacaccggctgtcccagcttcataagagtattttttgtccagccgttgacgcataccagtttcttatccagggtcaattttaaatctgtttcaaacagacgaaagccattgctatatttttccaaaatggtatccggagaattcatccctgcaaactggctgttttttcctcctaaagctgctgctgtgagaatacgtttccaatccttttttccaatctctgtttcctcctcctgtttctgcttttccgtatgaaaaccgtattttttcaggaagcctcccaaagaatccaggattttatcacccccccccccccaccaaaaaaatccctttttttatgcttttcgcccatagccctttgcaggcgagaaaccacatccagtgcctccatgcggtcagcttccacaaaccgttccggatgcccaattccagccccccattgtgccagcttatcattccacaccaatcctatgctggggcatcccacggaataggctatgatattggtatgcagccttgttgcgatgattcccttataatctgatataatccgcaccagctccgcgccctctgccggacgttttctgataaaattttttttattttccacgccgatgtatttaagaacatctaatccaaattcgtaatctgaatgcaggccattgttaaatatctcccactgataccctaattcctccagcctgaatatcacctgtttccaaaaatccagaagaaactctctggtaatattctgatggccataatcaaaaaacaatccgtcacgtgctattccaagccctattttatccgtatccggatttccggaaataccataaacctctgaacaaaatgcagcggaatccggaacccgtccaatccactctttttccgtcaccaaataatgctttataaaggtctggtaatcatcacgaaccgtaatgcccttaacgcagacatcattgaccgctattttaagacgccggcatctttcatcccattcatcatatccttcgaccccggtacagtttataaaaacaggaatactattttccgatgcaatcctgataatgtccggaacatactgataaaatttctctctcctgtatttaatcaatccgccgccggcaaaaataaccacatcagaatttttaacatattccatatcttcctggtacatgttataatcgtgaattacataattttggattcccgcattttgcagcgctttttctacaaaatactttgcacactccgcaatcacggtatcccctaaattgcggttgatgtactctgccaggaggatattcaatttcttgttttccataagcctatcccatccatctccgctatagcagcgtatccgccatgaatcgctttttctgcagctcttgagcaatttttttccaatcatatcctgacgcaagactttttgcacatttcttaatcccctcatcctctgtgcgcgtaagggcaatccttatgttttgtatggcttcatctacagaagcgcttctgtacagggcgggagaatcaggaagacggtccatatcagatgcaactacctgctttccgcaggcaaggtattgaaaatattcctttggaaccgtatccgcatgtctaccaaaaaagggaagaattcctatatcaagggattgtatcattgatggaagttcttcataagacaccggtacataatgaagattatcaaacccgtgcatccatacaggatatgttccaaaaacctcccctgcaaatataacatcacagtcagaaaacacctcacagatacactgcaccattgcaaaataaatcctgttatctattaccccggcaaatccaattcgtttccgcccgcccatatattttgcactgtgagaatatgatgaaaacattgggtaatccactccgccggtaatattgcaaaccgccacattggcgcattcagttatgccgtaataataggcaatatcctcaatctcagcagaagaccggcctgttaatcttcgtaattttccaggtatctcttctgtaatatacagatatctttgagctgggtttttacaaattgcctccagctgctgctcttttaaaacaggttttgttgaatcaatgatttcatatgtttccggcacatgcttttttaaaagttccgctgaggaggggtatcttgataaagtgatttcttctgctgtttcctctttctccggcagccctctgtaatttataattgtctcataacagcgcctggatgactggtcatccataaagtcaaacctatatgccagcacactttcccgttccttttcatatttttccggattattaaacgcttccttcaaagcggacagcatatccttaaaataacgaaccttttcaccgggcataaacatatctatattatggaatacaaagcctctctcagatacatattcctcataatccggaataagatatacaatgggcctgttcagcagaagataatcgtatgctatggatgagtaatcgctgaccatgacgtcaaatacattaagcagatcacaatatcgcgtatcattctcaaacagcaaatcatccgttaattcaaagcagtccggaccaagagaaaattcccttcctgaaaaagcagtttgttcaatcggatgaagtttatatataaaagccgcctggttttcctttaaaaaatcagcaaacccctctttttcataatccttcaggcgaaaaaggttgtctgaaaaaatcgttccggaatggctgctgctgttggcccgaaatgagggagcgaaaaagatataccgcttatagtttcttatcctgctcccaaacattttttccattttctcatatccctgtacctttttgacactgtctaagcgtgcctggcctgtaacatagcatttccgcaaatcgtaacgaagctgggcagaaagcttaaaacggtcgtccaagctatgtacacacatcaaatctattttatcaaaaaactttgccagtttttttgcatattccgggtccatatcatgattataaaaatcgtgggccttaattccacttccatgccaaagattaacaaatatctggtttgcacgttttggcaggcgctcaaaggtgtaggaattcataatgacataatctgcttcctttaataaagcatttccctccacagtatcgtaaacagcacacctgacgcctcttcttaacagttcataatactttttatccctttttaccagccaggccgtctcatgatatgtattatctttcacatattcccagagagcatgtggattgcatgcaaaatccggctgtgacataaacacaaacagcatttaaaagcacctctcaattataatggaatcccgtaatacgtcatcatccgccggcaggcctcctccagtgatacctgctcgctccacccaagactgcttaatttgtcagagcttgtgcagactcttgaaaccgcatgctttactgccggatcgttttttcttgtttcccggttaaagtccacctgaattgatttcccttttacctgtcctgccatggtctgtgccagttccaggacagaagcttcgcccatttccgtgcatatattataagcctgtgcgttctctccttccgacatcacataaagcatcccggcaatggcgtctgtcatatatataaatgtccttaccggtgtcccatcccctttaaggacaatcttatctgatttcagcatctgggatataaaatctatgtgaagccttccgtcatccaatgcaattccgcatcccattatctgtccgggccttacaattttacaaacagaacctctctgaccatagcagacgcataaattttcagcagcccgctttgccgctgcatatacatttctcacatcaagggaatccagtattccggtctcatcctctgcaaatctctcctgatgggatctcccgtaaatatcaacactggaaaggtaaagaaattctgcatgatgatgctgtgcaagcttcagcaggttgctgcagccaaacacatttgtctcaaaagtggcaaccggatcttcattgctggttttcactccggccgggcttgcagcgtcaatgataaaatctattttcttttcaatttttatctcttccaggacatctccaatcaataacgtaaaatcttctctgtcaaaatactctccaaagcgctctcttgccttattctcattcctgcacagggcaatgacatggatgtcttcattagatattttgtttctcatcataaacccgtgtacaaaatgctgggggacatatccgttggctccggcaatcaagatggttttgttatgaaacttttgccaattaataggcgtctgcgcaatcgtcaatgcgtcttcttccagaatcctgttcatttcccgcctccatacaatttttcctgttctataaacagaggatataatgcttctgctatggcaagatcctccggatatgtaactttgatacaaaaccgatcacccataaccatgctgcattctacgccaagattcaaaacaagttcactgtcctcatttacttccaccctctgctcgtcctgcagataagattgatgtgcctgctttaacactgaataccggtatatctgcggtccctgctgcacaaataattttttcttttgcagcgttctgtttaccatcttcccattgttgctgaaagtaatagcatctgttgctttaataaccgtaatgctggcatcatataatgatatctgctcatacaatttgtccattgttttttgagatacaaagggacatacagccgtcataataataaccgtatcccttgctttagccggaagggccataatcccgttatacacggattcatatcgttcttttccggattctgccaaaataagcatctttgttattccatatttgaaggcccactctttaattttttcatggtatttggcaggcgcacagacgcaaataacatccacgttcctgttttcctgggctgttctcagagagtataccaacattggatatcctgtcatctcaataaactgcttcggcacatctccctgaaacctgacccctttccctcctgccagaataatcgcgtaattcataatctacctcattcattacatgttgatatattttacttcccactgttccatccaaatttgccaggtgcttcgaaatcacttccagcctatgttctctaaaacccgcaatttcttcataattttcaagaaacaggctgagggcatttatattcttttccttataatacggcctgtgctccagcgagccataaaattcttcctttgttatctcgttttccagcaattcttccggataatggtaggctgtgagcatcattggttttcctgtaactgaatagatggtcacaagtgaaccgcccgctccaaaataacaatcagacacagccattgccaaatgaggttcttcactttcatccaatatccccagttcccattcctcaaactcctttttcagcttcagatagcttacgtgaagttcagggtgcatggagtgtaaagtctccatggttagaggatgctccctccacagcaaaacgaatttgtccctgtgcgctgcaaagacatgaaaaatgcggtatagattatcaataaagtgtgctccgttatttaaaatcaggctgacatttgtattaaaaaatacaactctcctgtttccaatcctctgtttccatgtttccggcatttctgcccggttctttatttccagaagcaatttgtctgttttgggagaaccaagggcggcaatttttttctccagacgcctgctttccccatggtacagctttgtttcaagaagtttcacatactgcttttttatgggttcactttgaacaaatatgatatctgcagaaatcacccccggagtcagaacaaagtgctccggaatagaccagggcacaacataatatggaacatataccaatttatctgtatattcttttaaatggtccgagtaaaaaaaagggggtatacttgtcacccggttaaaggcatcataaggattgtggatgaatatcacgtccggacgtttctcctggaaattataatctctgtaatccaccacaggtacataagaaggatagcggtctccttcatagtgttcttccttaaagctgccgtccggatttttactataatatggtatggggattacaacagcatccacatccttgtcctcatccgccgctctccagatgctttcaagggaatcccacatactcaccttgtacggcagaaaaacaatctcctttctgtcatccggcacttcaatccatacatcctgttcaagctctgtcaattgaacccggattctttccaacagccctttatacaaaccctcatctgaaatatttgcgcttacctgatatatatgttcgcagtattcttccagaagccggaccatatgtccgcatcttccgcctaaggactcaagatatgtgcctatgagaatccctaattcctggcaggcagccagcgtatccagggttgttgaaggatcagacttaatggttttcctgattgcatcattagcattcaatagagtttccactgtatggagtatttcttttttcttatattttctcatttgcattatcctgctgtttttattctataaataggtcatatcataaaactctttccgatacaggaaaagccatttaaagcatcggctttcaaatggcttttcctaaatatcccgcaataaaacgggttactatatgtactgctgattaccggagcagactcaaaacattctgcggaacagcattggactgggacagcatggactgtgcagcctgaagcagaacattgttctttgtgaacgctgtaatctcatccgccatatcagtatcgcggatacggctctccgcatctgtgatattctcagaagtaaccttcaggttgttaatggtatgctccagacggttctgggaagcaccaaggtgcgcacggtaagtggagaccttatcaatagcgctattaatttttgcaagagcattgcttgcctcctcctgttttgctaccttagcatccttaacgccaagtgttgcagaatccattgcgcttgccttaactaaaatagtttctgcctttgtcggaccaatctggaatgtcatatcgccggtgctgccacttgaagcaatcggcttaaccccgttaaagtccgtatactctgcaatacggttaatctcttcattcagcttatcaaactcagtctggatattgtttctcgcaacagagttgtaagtaccgtttgcagactgggtagccagagtcaccatacgctgaagcatggagtgtacctcggtcagggcgccttctgctgtcttgatcagaccgattgcatcatttgcgttaaccgcagcctgattcagaccattaatctgggatctcatctgctcggaaatagccagaccggctgcgtcgtcgcctgcgcggttaatcttataaccggaagacagcttctccaggttcttgttcagggagctctgatttgtgcctaaatttctgtaagaattaattgcggatatgttgtgctgaattatcataaaaaatttcctccttgaattgttctctatacttgccgaaacctccatgtaccggctttggtgttcttcatgggcccgttttagaacacagctggaagggtaattattttcccttacatgatataatatcggctgtttttctactttcataaggatttttttattatatttcataaaaatagcctgctgttttaactttccgcacagacaaatggcaaaatatcagcaattatgaaggccatccccagaccatcctgatctttccgggatccggatatataccgccccgtaaaatatatactcttctaccataatctttttggcgcgttccaaaacatgacggtaacactcttccatactgtctgcaaaagcagctgcatttcccttgcatagatactgatgtgctgtgagaaccaaatcgttaagcgataaaatgttccgtctttttttcgtataatacgtaatatagtacccccattcagtaagccggaacgcctcagtcagtatgacacgcataggctctaactcaatatgttttaaaacagcctcaaacatatcaattaaataaatagaatcggttcggctgaacttttcagttaattcctttatctctttttctgtaaaccgctcagctgcaagcagtgcggccggatgaatgattaatgtgagtaattgaagcgaattgagatagcgcagtgcctcctttgtgcgccttggattcggaagcagctggcttaccctggaatcatccggttccgtaactatggttccctttgcattcatcttctttacataacctctttcttccagctcagccagcgcctttctgactgtggatacggatactctgtactggttggctaattgcttttcatagggaagatatgttcccctcggataaaatccgctgccgattttccggtttaaatcactgacaattctggcgtaacagtagtcctgtccacgtgtgggattccatgaaaacggtgccggggattgaattggacatttaggcacagtacctgccaggtatttcatggtaccggcaatggaatccgaaagcctttgatataaggctgttaattgcctgtattttacagaggaatcctgtccttttaaaatatccataagagcgcctgtcccaaatatattgtcctttaaaaagatttccgtaaaataagaacattgctctgtaaaaaacgtgagtttactgtggagttcaaatgttgaatagagatctccgatcaaagggcttccccctgatttcagaatatctctgtttaaagcggaaggcggacgccacccacccgcagccatacctgcctttgccgcttcagctgcctgtccataatgaggcattatctccaagtcgcatccgcgggatgcaaatgtcaaaagcggcggcattatgtaaactaaagtttgatataactgtgtgataccatccctttgtttcaatatactcagtactatattctctggatgaggcatattctttcttaaaacaacccgcggggcaagtctgggctggttttcaatcaatccctcctcctttaatgcctctaatacgttattaattgtatacaggcttacctgaaattcatcgcacagccgtctggatgacggaaggcggcttccgggcaatatctgaccatctgttattctctgttttaattcatcatacacgtaagaaaacttggtcgtttgtggaaccatggtttatctcctcctactttataagctgtttttattatatccaatgccttccaggctgtcatcggccaaaaatatccagctatttgtatacctatacagttcaaattccgaaggaaaaaaataagaatagagaattccctatccttattttttaatcagaaatcttttcagcaatcgtgacacttccatgatatcgattggctttgcaatatgggcgttcatgccgcactcatggcagcgctgtatgtcgtcagaaaaggcatccgcactcatggcaatgattggaacagataaagcatcagagcggttcagctcacgaattgcctttgcagcctcatatcctgtcatgtgcggcattcgtatatccataagaacagcatcataatatccctctggtgacttttggaacttattcaggcatatctgtccgtcttccgcccaatccagctccacgcccaggtcggataacaattcatttgcgacctcccaattcagttcattatcctcagcaagcaggatgcggtgcccggacagatcgatattctgttccaatatctgttcatgcgctgtttcagtgcccatatattgacggagactatgaaacagcgttgatttaaacagcggttttgaaataaaaccactaatgcccgcctggcgggcttctgtttcaaattcactccaatcatatgctgaaatcagaagaatcggcaccttatctcctaaattgcgccgtatttcctttgctgcctgaataccattcataccaggcagtttccagtctaacaggattatttgataatcatcccccttgttgtggcgttgaatcaccaattctatggccttttctccgcttaatgtccattcagcatttattccaatggatttcagtgcgtccatggctgttttgcatagtaattcgtcatcgtcaactaccagcatattccagggcggaaggaccatatccccctccactgcatcagctttttcaaaatcaaacgcaatctgaaattccgtacctctatcaggctcgctttgtacatcaatagtccctttcattgcgtccacaatgtactttgtaatcgccatccccaaaccggcaccttcggttttatgtattctggcttcatccgcgcggctgtaggattcatatatttttttcagaaactcctgcgacatgccgattccattgtcgctgacattgatatgaatccggacataatcttctcccttgggagatttttcttcaaataggaataaccgtatggagcctccctccggcgtatatttagttgcattggacaaaagattcagcaaaacctgattcaaacgcacaccatcgcaccatacgttttccgtcacaacattatcaatatgaatgtcaaatgtttgttttttggccttcacctggggctgcataatgctgacaatcccttcaacaacttcctttaaagagatatgatctgttgtcaaagtcaatttaccgctttcaattttggacatatccaaaacatcgttgattagccccagtaaatgtctgctggacagtgcaatctttctcaggcaattctgtacctgctccctatcatccatgtgggctgttgcaatcgcagtcatgcccacaatcgcattcatgggcgtacggatatcatggctcatatttgctaaaaactcactctttgccctgcttgcctccagcgcctcctgacgtgccttctccaattcaaacagctgggaacgggtcatggaaaaataccggaaaaagatcaatgtcagaatgattaatacagaaacacaggacaacaatgtcatgaacatacgctggctgctcaggctgttaatgatattgtccaaaataccgtaaggcattaccgctaccaggtaccactcagaataaggcaatggtatgccacaaattttttgctcctcgccatttaattcaaatattgtggaatactctctgttatctcttaatgcatcgccaaactctttaacagagttttcggcagacggcttatctgaagcagaatcaatctgattttgtaacagattaaaaaatcccactagctctgtattagaattttgtattacaaaactggcgtccggccggataatatgataatacattaattggccttcgtcctccaaggcaagaaaatcagtgacatactccaaaggaacagccgctatcagaccggtgctcctctccccattcctcaagggataatctgcgtcaacaccaaacaataccacttcattaccatctgcgtcagttcccacagcaaccctttgttccccctgtattaacgcttcaacaaaaggtaatggattaagcggctgcatgggatttccataaagagtttcaaagtctccctttgcagagcagagggctaaatagtcaaacgccctgacctgcgccctgtaaacaagctcctcatataagtcttctgtttcactgccttcccctgaaacgacagaaacaatgccgtgaacctgttcaaaacgcagttcaactacattttcaaagtgcttggccatttgttcattcattccagacatatagatttctccaacttcataaatggtctttttgctcttttgattcatataaattcccagcatgctgaaaataacaatactaaaaaataaaagtccaataaagctgtattttagaaaccgcgttgtagcattcttttttttactgctccccattgtattgttattcctccctggaccttttatattctttcaccttattaataatttggcaataatcatttgataattggggcatcatatcaactgctttattataatcgttttcttttaatgcctttgtcataaggctgctgcttgcatataacctgccaaatgaaagattctgacaaatacctttgagtgtatgaacagcccgaatcgcctctccataatccctatccctcatagccgcttcaaacaaatcaaaacttttatcatccagaaatttataaacaaatttccggacagtctgttcacgccgcaatctgcccagcacctcatcaaaatcaccgccaaaactattatagcaatctcttaaatccatatttatatttcctctctttttagatgtcatctgcttctttgtcaagaaaacgtattgccgctttgttctttgtgatttttgcctgatacatcatactgtctgcaactttaaacagttcctttggttttcccattccatatgctcctcctatgcttacagacatatgtatttcggggtgtccgtccaccttcaggatatcaacagagtgtcttattctctccagcttttgttcaaaaacatctgcaggcatactgttaaatataattacaaattcatcaccgccataacgaagcacggagtctgtctttcgtacacatgataaaatagtctgggcaatgctttggagcacgatatcgcctacattgtgcccatacgtatcattaatctgcttgaagttatctacatctatcataacgaaagcctgaatattttcttcaccttgaaaatgctcgtcataataacggcggttgaatacattggttaaggaatcaatatataataactgcagatgtctctttttatgggacaagatagtgtatttttccctggaaaacagtctgtcatagtctattttacttctcatattctgtatatcattagtttctttttcagatgaggcaaacgttaactcatgtttaagtgtatccgaaatttcttgcaggcatagtaaaagaacaggattaaaggccccgcattgaccatctaaaatcattttcaatgcttcatcatgtgaatatgcattcttatagcacctcttgctgatcagagcatcatatacatcagccaaagcaaccacctgagcagcaataggtatttcttcaccctttagtccatccggatagccattgccgtcatatctttcatgatgccaacggcagatttcaaaagccactttgacaagcggcgccttctgctgctccatcggcaattccatcagaatttttccgccgattgctgagtgcgttttcatcacttcaaactcctctgccgtaaggcgtcccggcttattcaatatcgtatctgaaattgaaatttttccaatatcatgaagtgatgaagcagtacttattaaagttatatcagatttagacaaaggatacttatctgtccgctgaaccagctgtttcagcagatattttgtaatggtattcacatgcagtatatgcaaaccgctctctccattgcggaattccacaatatgagacaggattgcgatcatcagcttattatttttttcctgttcatagaattgttctgcgataatttcttcaagacgctgctgccgtgcatataaaaacatcgtattcgaaatccggcgttggacaattgtagaatcaaagggacggctgatatagtcaaatgcccccaagtcataggcgcgttttatattcgcgggagaatcatcagcagaaatcataataacagcaaaggtatcattccagtggttcttgtttatacaggttaatacttcaaatccgtccatttgaggcatcataatatccagaagcaggagagagaaatctgttctctcctgtaaaagaatcgcaaccgcttctgcaccgttctcagcttctacaatatcatattggtcttccagaatatctatcaaaaggtcacggttcatctctgaatcgtccacaattaaaattttttgtttttccatatgttataatctcttcaaaaaaatttacagtttcattataaatatattttatgcaccaaggtaataatcatattggacaggtacacatatagtttatggcttttgggctgaaaattagtgtttcagaaactgaaccggcaagtcattgcagcggtacagcatctgcgcaagggaaacatagactcttttgcagatggaattacagattgtacccgttactctttaatccgtgtaaaagactatatgattaacaaatacaaattttacaggatagctaatatccgaatcccggaaatatactaagaaaaccgctacaggccatagtgtgcttgaagattgacccccccccacccaaaaaaaaacacaaggtgtgcatagtgtatgccgcattcttacgaacattcagaatactaaagcatggcaaagcggtaaatccatagcaccgctttgcccgctctgtaactggttgaaaataaaagtcaggctttatgacagttccccggattaattagtttccaaaatacaatgctgaactatactattccctgctgggcataataatcatcaaacagcttggtgaccgctgtatgcgtattgccgcaaatagatggaagttcacctccccatgtcacgccggcctgttgaaatcccttttccacagcagcctgcatctccttcattttatctacatcatctcccgcaagagcgtacgcgaaatcgaagattctctgagaagtctgcgacaccccccaatatccgttctctgagattgcctcctgggcctctgccttaatctgtgggtccactgtaaagttaccgctcgctatcatcttccagaaatcatttcctttggcctgattggctgtaatcccctgcttctggaaggtctgcatcatcatattggtaaaacgagacatctgattgttcaaatcctcttttaaactctgtacaagagaggctctctccgattcactcatcttactggttacggccctatccttattgaattccgcacaatccacatcctgcttctgaacactggaaacagtttctttcatatcgggcgcctcgaccgcgactgttgatgttttttccattttctgaactgtctgtgtatattgtctgatgtctgtattctgatttacattaacttgcatatctcatttcctttctccaggcacaaaatattatggaaacggtttgcctggacctatttttctgttatatttcttaatcgcggggaactgcgtaaacctgtattcaattaacagctttgtttgtaacttgcacaattatataaggctaccacatattaggactccctctatttctcatatctatcaacctcctttacccccatagaaacttatctttttaatctatatcggcaattctgaataaaagataagagaacaatacgccctttatatgatatttcattctcaaagtacttactttatctaaaataagatgaagcatctcatggaatttattagttgcttcttaccttcttgggccatcaagccgtctatcagtaccaggcatagatggatatacctctgtacgcagatatcaaagcagcacattgaaaaagggaatttttatataatgaaaaaataaattgatttgattagtagagaaactacctcatagcaaaaaaatcagctgacatcctcaagctatatggacatcgacatttaccatcataaaataccgatttttgtcgtctttaaacttcttgattatccccctcctggcatattaagttactattgtaacactatataaggagggattagtatgaaatacaaaagagtaaccagtaatctacttcggcgcctgggcgtcaacaactcctataagggattccactatactacttatggagtcagccaaaccatccgggatccagaattgctaacctacatatcaaaaggactatatgtagagattgccagcagattccaaacatccattggctgcgttgaacgagatatacggactgtagtcaaaaccatatgggagtatggagacaagatgcttttatatgaagtctttggttttgaaatagaacagaaaccacgcaatggggcattcatcgatgcagtagctcattatgtggtagagcattattatgactaattatgaagggcgccttgtcagcgcccttcacggattaatcatataagtacaactcctctcagttggatatggttgattgtcactggacatctcaattttaccataaagctgtgaggagttgttttattactgtgaaatatcagtgcagactgttctgggcaatgagtaaaactggtccctgccatcacaatcaaaaagaaggcgtgagtccggcaccgaatgtcttcttatctgcccgttgtaaaagccagcggagccgccagaagccgctccacttatttggatattatttatttgcttttttattaacttaatcttccaacatagttatcaggtgattgcactgtgtaaaataggaatcctgtgttaaataatattccatcagaccttccaaatttaatggcaaaaccagtagccttctttgttccatgcagcacataaatctcagaccagaaatccgtacatgtctcgcttccattcagcacctgaccggcggaagcatccgtggtgattagtcctgcattcatcagctctcttcctgaataggaaccgtcccttccctctatgatataatccattcctgcatccaggccatggagctttaatcttctatagggacaaaccacatcatttaatattttataatatcccatgactgcgtctttcctgtcatcagaaacacacccccccccatgctgcttaagggatacaccatgctggttccgtactgaatccggatacgttctacagcatcgctgttatcgctggtccaggtctgcggtgcatagtaaagcatgcccggatcaaatctcccgccgccgctggcacaggactcaaataagatttcaggaaactccaatcggatgaattcccatgagcactctcgacacatcataagtatcaacctccgcctgcatcagaaaatttccgctgtatacaaggctcattccaagggcctccccctggaattcatcagcagatggccgttttaatgccacaaacggattgtggttgtggctggagttcccccggatgctgccaatggcctggattccctgctggagcgccctcctctttatctgccgttcccgcgaccatgccccggacagctgaatccattcataatccttatccggcaaatccaggcatgcgctcatggccctggcaagcgttaaacgggcggcgctgcagtttctaatcttcgcgcttcttgtgatgaccgggtaatccctcataattgtgtagcagagaatcagctgcgcccccataagcgtatcctccagaaggatttccagggtctgggcttccccgggatcctccgtgtaaatggccggcagccccttaagtcccggttttccatcatatattttatgggctttatacacaaaatccgaaatccggcttccattctcctgtaagatttcaaacgctggttcacggtaatctgtggttccgtaagagggatattcctgtttcagatgctccagggaataggataagtccccttcaaacaggtatgacgtcataggcctgtgggctgtctcaataaaataaccgaaatcctctttatccggtatgctgctcccaaaatacacctgtcccatctggccgtttctcaatacctttatgatataactgatggaatcattgtaaaggtgaaattcctttgtctgttcatgataaataatgctcatacaatctcctgtctctatacctgatatgaatctgcagctgatacccctggctctgtccaactgctgtctaccttccgctttatgccgcgtgaagctcatttagtttctgaatcatttcttccaggtatttgccctttaatttataacacttggcgtaaatcacataactgagtactgcaaatatcatgggaatggcaatcatgatgatgcggattccattcaaggtggcgtcagattgctgtggcagcgttgcattctatccgacaatcgccagaccaccccctgtgagaagcctttttgatatgatacaaaaaaatggataccgactcaaccgacatatgggagaaactggaggcggaatatctcagctatcctgccagcggaatacataatcatggtacatatttggaaaattatctacagaagcactcaacacacctttgggaacatatgaaaggttgctggtcaaaattagcggagcttaaatagcagacaacggcatagccggttttggctatgccgttttgctgttcgtttcgttggtatctggtatcatgcggcccaaacttgaactgttccatcagaagaactataatgtgttttatacgaaggtggtacatggtggactatatggctttgagaaaagcaagttaaaacggggtgccgcaccccgtaaaacaaattacgattgtactgctggcaggatttttggggctggaacgattggcacaatgcggctgatgcccaaagatgcaaaaaagccagccgatggatggcgaaaggggcataaatatgagtagaattttacttcttgaggatgatttaagtttaattaacggactgacgtttacgttcaaaaagcagggccatgaggctgacattgcaagaacactggatgaggcagaaaaaatatggtctgacgggaaatatgatctgctgattctggatgtctctttgccggatggatccggctttgatttttgtaaaacggtgcggcaagtttccagagtcccgattatcttcttaaccgcgtctgacgaggaaacaagtattatcatgggactggacatgggcggtgatgactatatcacgaaaccgtttaagctgggggttttgatttcaagaatcaatgcgctgctccgccgggtaaaagattttggtacagcagatacagaacttcaatccaacgggatacgggtactgctattacaaggacaggtgtataaaaacggggaacgtttggaattaactgcggcagagtacaaattgctgtgcttcttcatgcaaaatcccaatacggtgttatcgaaagaaaaaatcttagataagctgtgggactgtgagggcaactatatagacaataatacactcaccgtgtatattcgccggctgcgtatgaaagtagaggacaatcccggcgagccgcagatgatagtaacggtccggcgaatgggctataaatggaatgttgtacggtgaggtgcggttatgaagctatttgtaaataacgaaaataaacggtttatcggtgctgccgccgccgttctgcttctgtacgcgatactcagcgaagccttaatatggatatactgcaaaaagctgtccgtagtgtttcttttcctgttcctgtttttagcagcctgtatccttacaatatatgttcgctacttactctggcagagcagaatcataaaaaaagcgctccatcagattgaagcctatctcgatggcgatatggaagcccgtatcgactgtgattatgagggggaattataccgtctgttccatgaaatcaatacaatggcggcggtattgaacgcccatgcattaaatgggataagggacaaagattttttgaaagacaccctatctgatatttcccatcagctcaagacccctctggcggcattgaacatctataacggacttctgcaaaatgaagcagaaaatctgccggaaattaaagagtttgccgagctgtccgaacaggaaattgaccggattgaaacactggtacagaatttgcttaaaattgcccgcctggacgccggaacgctggagatggaaaaggctcctcagaatattcccgatatgatgaatgacatagagcttcatttctcctatcgtgccaagctggaacacaaaagacttacactctcaggaaacaatcatatcatgtttccctgtgaccgggattggctgatagaggcaatcagtaatattgtcaaaaatgcctttgaccacacgaaagagggcgattccattcagattgaatgggaacagtttgcgtccatcattcagattaaagtgaaggatacaggctgtggcatccatccagaggatttacaccacattttcaaacggttttatcggagccgcttcttacaggatacgcagggcattggtttgggcctccctttggcaaaggcaatcattaaagcacatgacggcacgattgaagtcgaaagtgtactgggagctggcacaacgttccgtatcaactttctgattcctacaaaattgtagtcttacggtaatatcacagtaaggtagtggtggtaatctttcggtatcaaaaaaaagaggtgttaataacatgaatctattagaagttcaatcattatccaaaacctatggtactggtgatattgctgttcatgccttaaaggctgccaccttttccgtgccgaaaggagagtttgtcgcaattgcgggagaatccggctccgggaaaagtacactgttgaatatgctgggagcgctggacacacccacttctggtaaggtcttcattgacggcaaagatattttctccatgcaggatcaggcacttacggttttcagacgcagaaacatcggttttatttttcagtctttcaatttgataccggaactgacggttgagcagaatatcattttcccggttctgctggactaccagaaacccaacaaaaaatatttggaagagcttttaacggttttgaatctgaaagaacggcgggaccatcttcccagccagttatccggcggtcaacaacagcgtgtagcgattggtcgtgcactgattacacggccctccctgattctggcagacgagccgaccggtaacctggatacgcaaaataccagtgaagtaatctcgctcttaaaagacgcatccaaaaaatacgagcaaaccatcataatgattacccatagccgcagcatcgcccagacagcagaccgggtattgcaggtgtcggacggtgtactgactgattttgggaggtgccgggaatgaaaagctatttaagtttaattccaatctctgcaaaggtacaccgccggcaaaaccgcatgacatcactttgtatcatctttgctgtattcatggtaactgcagtattcagcatggcggaaatgggagcaaggatggaacaggcacggctcgcagaaaagcatgacggattttccatatctgttttgtttagcagcaccatggggcagacgctcctgttgagtgccgggattatattcctgctgattttatttgcaggcgtattgatgatttccagcagtctcaatagcagcgtggcccaaagaacgaaattctttggaatgatgcgctgtattggaatgagcaaaaaacagattgttcgattcgtgcgtctggaagcattaaattggtgtaagacagcagttccaatcgggcttgcccttggtgtgtcagcttcctggatactgtgcggtgttttgcggtatgctgttggagaagaattttccaatattccgctttttggcatcagtgtaatcgggattgtcagcggcattattgtgggagttgtcacggtgctattggcggcaaggtctccagcaaatcaggcggcaaaggtatctcccgttacggctgtttccggaaattcagaacatggaaaaatgaagaatcacacgttccatgcccgctctatcaaaatagaaacagcacttggtatccaccacgctacttctgcaaagaaaaacctgcttttaatgacaggctcgtttgcccttagcattatcctttttttgagctttacggtcctgatagattttgtcaaccatcttatgccccaatcggcagccacttcagatattgatatttcaagcagtgacggattaaattctatcgacaatgcattggcggaaacacttcggggaatgaacggcgtaaaacaggtgtacggacgccggggcagctttgatattccggcagagagggacacagggacaatggtttccagtaccgttgaccttgtctcctttgacgattttgatttggattgtctcaaaaaggatggagcgctccatagaggcagtaatctctctaaagtctatggaaacagtaattatgcgcttgcggcttgggataaagacagctcatggaaaattggtgataaaatccttatcggggatgaagaaattgaaatttccggtttactgaaatacgatccattcagcagcaatggtcttacaaacggaaaaattacactgattacttccggcgaaaccttcacccgtttgacaggcataaccggatactcactcattatggtacagacaacttctcaagcaacggacgaagatgtatctcagctccgcaataccgtggcggagagcggtaatcatttcagtgataagcgggatcagcgcacatcaggcacttatctggcatttgtgttctgcatttattgctttttaggaattattacattggttaccgtactgaatatcgtgaacagcatctcaatgagtgtatcggccaaaatcaagcaatatggtgctatgcgggcagtcggaatggacgaacagcaaatcacaaaaatgatttttgcggaggcattgacctatgccttttggggcggcggaattggctgtgccattggtttgccactcagcaaaatgctatatgactttctcatttctgatcacttcccctatgcggtatggagtataccggtgcgttcattagtaatcattcttctgtttgttgcttttgcggcaacgcttgctgcttatgctccggctaaaagaatacggaatacaactgtgactgaaaccattaacgagctataactgcattcagttttcggcagggcagctttgagaaatcaaggctgtcttattttttactggttaatcacaccacttttacacataattattatgcagccctgtttctccgccgcttcaaatgccgtgccctccctagcggagcagcagataggcaggacgtatagcatactactccttgcaatcaagatcctgtgccagagggcgccactttggaaatgccattgagagggccgcggcccacgcaatgtaaaagacagccaagacagaaggcggccgccaagtctgaaaggaacgggcttgtgcttcagtgaggaactgctgaatacccggctgtctctgctcgaatatttacgcttatcaaacgacagatggctggaagccattctccgtatgatatataactctggagggttttgggaaccttcctgaggatgatgcccttgcacctgttttgtttttactgtcatttttgcatggtgtatccttagctcaaggaggtgcataaaaccatgcggacaacagtaaaagacgtaaactggcaggaccagcaggctttgtggtttgccgggttaaaaccggtcgccggtgaacggagtctttccaaaaagctcccggagaactacctcaggatcgtggaacaggcaatacagctaaaaaaggaagttacaaggcgttccgtagaacagatcaatttcatccttgagcaggaaaaacgcgaaagttcatccaaacgcttctgtaagccccaccgaatgatgctgctgcagggagacattaaatatggctgcaagctgtcaatcggtaaaaacggtgccatggtacagacgtatctgtcttctgccattgatgaccattcccggtacgttatccagtcacagttttatgataaccaggaagaaagcatcgtggaggataccttccgtaaggtgatcctgaaagccgggaaatttgacacagcatatttcgacaatggctcccagtatgtcgcaaagcagttaaagctgtcacttgcaaagcttggcataactgtccgccatgcgcccgtaagaagcggaaaatccaaagggaaaatggaaaaaatccatcaggtggcggacgctttcctgcgggaagtaaaaatccataagatcaagacactggaggagttaaacagctactggggcatgtatcttgaagaatactatcacaagacatcacatgagggtatccgggatgaactggaagatacactggattctttccgctattgccggtatgctgtcacgaagtccctcaaaataattcttctctgtctcttcggtgtctgtcacaatcaggtaatatcccagttccggtactctctgccccatccgctgattccggtctttcctcttgccagccctgcggtcgctgggctttcctccactcttattcgccatccgtgctcctcccctttaacatttccataggccggagcgcagggatagcgccatagctgcccgtcaggtaattctttgccagcgcttcatcacggcgtaccttgtttccgtcctcatccttgaaatcagcaagggagtacaaatcggaaactccatcctgattcttgtccaccagccatatctcatcccgacgcaacaactcattggataactgccagatgtcatgtgtggtaaaaatcatctgtgcatgattggtattaatttccggtgacaaaaaagtcaatatgatgtttctaaccaataacggatgaagtctcgcattcagttcatctacaaacaaggttccgccgttatcaagcacctctttcaaagaaggatataaggcaaacatcttcagcgtcccactggattcacttttcaaaggtatagattcaaattcatcgcaatccgtcatcttatgcaatgcatcaatcttataactgagatcggactctttttcaatttcccgctggacttcctccactttaaaatcacaaatggcattatcaaatgatgcaaaataattcaccacattactctgtatttccctacttgtggtaaaacctttcggcagcacctgggaacggaaaaagttctccgcaggatttccgaagtccacaacttcgttattcagaaaccagtcccttacctttttcagtttcgatatcttcagctttgcccctagcgatacaatcaaagtctccttttccaatgcgacctttatattttcaatactactcttcggcagcccgtttacttccagttcttctcccttttttcggtagaaaatagtcttatacctgtttctcgctgtcttggccttagaataaaaccattcctccaccacctcgtcattctgcaacgcaaacccatattgataaatttttccagtattctccgaattatcaacaaagaacacttcaaaggttgattcctcactcctgctcttactgtcaaacaaaaacgggcttaccctaatgtaatccgaatctgctttttgcctgctgtcgctttcaccgccaaacttaaaggattcctccacataatagctcatgaatttaaaagcatcgtaaatgttagactttccactggcatttgcaccgtagatggccgcaaccttcagcagcttatcatttgccatctccaccacatgatcttcatgctccgtaatctttgtagccgataaatccagggatacctcatcccggaaggatttaaaatttttaaagttaaactgtatcagcatggcactccccttcatctcacactcttttacgctcttaatcttattatatgccattttgcgaataaatcaacatctattttcattttttctgtatttatttgtatatttttaatcccataaaataaagaaatctgcgccagccccctgcgccagatgttccataacctccgggtataaaaggaccgttgctccgcccacgctcgtggagttggaaaggacatactgttcatacggctccatctggaagtttttaatatcttccccgatacaattatccgaaaacatattttttacaagttcaagcatacggatgattttcgccgggtttgcctccatggtattgtgcagggcaagcggatataattcctccatggatttgttccagtgggaatacagtgcatcggacaccagaatcgtagcctccccatgttcctgtgtcggcaaatgtatccgcagaaccgctgtcaagtctgtgttctcaaaatctctgtgtggtgtatgctgcagcttttcgctgttaaattctttattgataagctgtaaccgtaaaaactcctgcactttttcaaaatcagtcactaatccttttacatcagatagttcaaagtctttattctgtgcataactggaaatcaattcggcggcaatctcctcaatcgcttttcccttttggcactgtgcaaaaaaggaatccagataaacctgtggagatactgcttcccccggcgtatgtatcacaagagccataaactctgtattattgtttttcgtgactttctggatatacacgtctgcattgatgttctgttccgacagactttccctaaccattttttgtatctgcattaaaaatttgctgtattcaatatcgtttgccataagcgcctcctgcaatttatccgcaagggaacggagattgtccgtgtcctgcaaaaagccgttgatctggaaatcctttctctgcatatagtccacgcccagcgtgacggcctcattcaacatctggccaaactcgtcctgtgtaccatcatgggttacattcatcaatacctttatcagtaagaaaaatgcggcggcgtccatcttgccggacttcatcagcatttttgccagccggtttgtctgctgctccaccaccgccttgatgtccccgatgtggtagacggcggtaaattcctgccggatgatgctggcgataaaatcaatatcttcggcgtagccgtccaccgtcaatcccttttttataaaccgccgtatttgttcgttgcgggagatatgctcccgatcggccttttttggcattagcgccctcctttcggcgttagtcgaaaataaacaacgcaagttgctgtttaacaagggtacaggctttgcctgtatggtgtttccgtgggttgtttaacaaccctattcctgccttaactccaaaatataagattttggcactaagtagctcccaccgcaagcggtgagggctgttggtcgctacgctccccaaaaaggcgagaacaacagtctgccgcgtcacatcaatagtaatccatgaagatggtggcatacctgcacacgcgctttgcataggcgattgccaataccaccaacgcaagtccagcggcaatcccgccgcaaatcaaaactggtttcgtagcttttccctttccaccctgataagggtcaaaaaaagtaccatggtttcccatgatacttttcatcgtcagttatttacttttagcgttcccacccctcgtccggctctggctgcacggcttcctgctccatcatgcgatgcatttcaatcgtcttgttgcaaaactccaacaacctcggaatatcctccagtgcagtttcccacacacggtcaatgtctatcgcaccataattgtgtgcaaataggttacgcatccccttaatcgccggccagtaaatagttgctttcgtcgcttcccggaagtcctccggcaagtgtcctgtcaattctcctatctggaaaaggctcatgcagacagagttgcggaaatccttatccgtttcaaaaactgctttgtcttttccgaatcgttccagcgtttcctgcacatcaatacaataatgacggatatactctaaaatatcagcggctttcttcttcataaatcagcttctcatcctccttgatatgctttttgaaactttctgtgcgttctgcgttggcacggtggttcagcgcctccgtggtaactaaatccaccggcttatgcaacgcctctgtcaaatcgctgtaaagtccgccgagtccaaacatactccgtacctgcccgccgtcaatacgcaaatcaatatcactctcaggcagggcgtccccacgggcgtaagagccaaacagataggctctgctaacgccatatttttcaagtatcggcgcaatgatcctgctaatttcgcttaccgcataaatcccatccattttctcgcccctttcctgtaaaactcaatgctatatttatattatagcattggcggttttctattgcaataaccgcatttttgagttttaccataatcataggattggtgctgtaaacagtatcaatcctatgatgctcttgttataaagttaataattcagttattataatctctttggttatctgttgaatgcaattcattctccacaagcgccagttccttttcccctgattgaaacaatctcaaagctgcctgaaaaccagccgctcctgatccaattactatattttcaattctctctgttttaaacaacctgcatttatccttcacggcacattccccatctgtcttctaaggatatcagtcccaataaattgttgcgcctctgtgggctgacgtacaattatttttatacagcttgagccagcccaatgcaggcttttcaacaggcttccaattcattttacgattttcaaattcctcatcacttacatcaacagtcagctttctggaaggaatatcaatatggaccatatctccgtctttaatcaaagctatatttccaccttcatatgtctcagggcttacatgaccgattgccagcccccctgtagcgctgttagccttttctcatgttgtcgtgcggcaattagcatttcaatacggattctggtacagtgcccacgtgatgaaatcaagcttttttcggttcatctgtttttgactgtctgggctttattccccaaaatattacattcatcagaatcacaatcagtaaaaccgcagccattgccacccagaagccaatattaagccccagccattgggtcgttccgaaaagagtcatccaaatttctttccagttcattgttacacctccttagagcagttcgccatagtgacggacataggcttttttcaaactggttgccagcaccatatacagcaggatgcagggaatcagataagtaaagtatgctacgggcagagcgacaaagcccagcatcgttccaaaggccgtaaagggaataatggtcagtatcgtaattcctgccatggtgagcagtgtcaccggagcagatgcacggctctggataaagggcagtttcggtgtgcggatcatatgaatgaccagtgtctggctccacatggattccacgaaccatccggcctggaacatcccaatatactgcgcctgaattgccgcaagctctgcgccgctgtaatgagcggccagatcgttgaacaaaacaccgccggacacgaacatagggcagaatacaaaatacatgaaaatgtaggttgtaaagtcgaaaatggagctggtgggtccaatccaaatcataaaactgcctacactggaggcatcccatttccggggctttgcgataaattcctcatccacgttatcccaaggaatcgcggtacaggacaggtcgtaaatcagattcaggaaaatcagatgcacgctcatcatcggcaggaagggcagcagtgcagaagccgctagtaccgagaacatattgccgaagtttgaagatgcggtcatcttgatatattttatcatgtttgcataggtcttacggccttcaataataccctgctccaaaaccatcaggtctttttccaacaggataatgtcagccgattcctttgccacgtccacagcagtatctaccgaaatgccgatatcggcggctttcatggcagcggcgtcattgattccatcgcccatgaaaccaacggtatgcccgcttgcacgaagaatagaaaccacacgggctttctggtcgggcgtcagcttggcaaatacatcggcggcttctgcggctcttgccagctctgcatcgctcattttttccaaatcagagccaaggagcatattgcggaccttcagtcccacctgcttacaaatggtacgggtcactttgtcgttgtccccggtcaggattttggtggtcacaccatggtctttcagcgccttgattgcgtctgcggcggattccttcgggggatcgaggaacgcaagataccctatcagcaccatttcgcactcgtcctttacgccaaaagcgcctgccggagaggggttgcttttctgtgcaatggcaagaacacggaagcccttgtcattgagatcatccactgtttccaggatacggaggcggacatcatcggccagcggccgcacactgccatcacactccgcataagcgcagatggagagcatttcttccacagcgccttttgtcaccatctgggtcttaccggttttgtcctgtaccaccgtggtcagacggcggcgagtgaagtcaaaggggatttcatctaccttcacatagttttcagacagatcgagcaggcgggaatcttccgcttcttcttcctctgtcttatggataatcgccaaatccatcagattcttatagccggtctggaagtagctgttgaggtaagcgtggcgcagaacccgtgtatcgtcctcaccgtttacgttaaggtgatattccagcacaactttatcctgtgtcagcgttccggttttgtcggtgcaaagaatatctatggccccgaagttctggatggaattcaggttcttgacgatggtccgctttttgcccatggatactgcgcctttggcaaggcaggtagtcacaatcatgggaagcatctccggggtcaggccaacggcaatagagatgccaaacaggaatgcttccagccagtcacctttcgtaatgccattgatgaagaataccagcggaaccatgaccagcatgaagcggatcagtacccaggaaacagcgttgacgcccttggtaaagctggtctccaccgcttctccggcaatggcggatgccatagagccaaacaaagtatggtcgccgacacagatgacaacagcggtcgcgctgccggaaaccacattgctgcccatgaaggcaatgtttgtgtaatcggtcacgctctgcttctgtgcgctcacattgggcatcttttcgacaggctcactctcccccgtaagacttgcctgacttacaaacaaatcttttgcatccaaaatgcgtacatcggcgggaatcatatccccggcggacagatgtacgatatcgcccaccgccagagcttccatgggaatttcggctttttcctgttccctgcgggtaaccgtgcaggttgtcgtaatcatggccagcagtttttccgccgcgtttccgcttctggattcctgtacaaagcgaagtgtaccagaaatcataaccatggtcagaataataatcacggtcagagggtcaaaatcctccggcgtactgcctaaaagagaaaaatagggaaacaccatatccgtcatggtggacaccagcgccagacaaaacaggatagcggtaaagggattgataaatgccccggccagccgttttaccagagatttccttttttcatgggttactttgttggttccgtatttagtacggcttacggatacagtctctgcatcaaggccacgaagtgtggtatgcagatttttcaaaacttctttaacgggattggtagccgcaaactgaatgcggcgatcctgcccgtcacggatgactgctttttccgcggcctgacgaacagctatacgtttttctttcttgttcattggtcttacctccttgagttttagttgaggagagattcttaaaacaaaaccggtgtaaaccacacgaatcgcctcccttcaatcattaatagaatacaaaaatcgcaaggaaatcacatggctaaagccttgcgatttccttgcgattttgcaagaatttaggcgggctgagattggcccgactgtgttaaagttggtcgttaaatttgtatccaatgccccagatggtcagaatgtactttggcgcgtccgggtcaggctcaattttcttccgtagctttcggataaacgccatgatgttgctgtcatccaaaaggtaatcctccgcccagactgcccgatagatctgttccttagtaaaaacctcgccctggttctgcgcaagaaaatacagaatctcaaactcctttggcgtcaggctgacctccgccccctgcataatgacccttctgccctttggataaatttccagttctccgagcctcatcccgtccaacgggacgggcacgggagcctctgtctcgttggacgaactcaataacaaggatgacacctctccgtttagcatatcccggatgccggaaagtaaatcttctgcgcagtcactttccggcggttctttcatcagcttttccagcagccacgtttcaagggcggaatccattgggatgaaactgatattctttttcatgatgaattcctcctcaaatcagctcatggtacttcttctgatagaagtatttggctaccgtagtcagcagcatatacaatagagccacagtcagtaaaaacacgaaatatccgaacggcaattttgtcaggccgaacagcagcgcgccgccggtaaaggtaattgcggtaaaggcagcgattccggtaagagtaatgcagataacaggcgcagatggcctactctgcacaaagggtatcctgcgggtccgcagaaaatgcagaatcagcacctgcgtccacatggattccaaaaaccatcctgtctgaaaaagagacacatactgaagccgcagggcgggggaggtaagattcaaataggtcgctcctccgcacagcataggacacaggaagtaatacagaaacaggaatgtcactatgtcgaacagggaacttatcggcccaaaggacagcataaaccgccccaacgtcctgcccgaccaatccctcggagacagggtttcttcttcatccacgttgtcccagggcagaacgatgcacaaaatgtcgtacagcagattcagcagcaaaatctgcacggaggtcactggcaaaaacggcaaaaaggcgctggcgcagacaatggagaggatgttgccgaagttggagctggcggtaattttaatgtatttgagcatattggtaaaggtcttgcgcccttctaaaatcccctgttccagcacgccaagatccttttggagcagtaccacgtccgccgcgtcttttgccgcatcaactgccgtatccaccgagatgcccacattagcctcgcaaagtgccggaatgtcattgattccatcgcccaaaaatcccactgtgtggccattttggcgcaaagcggaaaccagacggaccttttgccccggcgtaagctccgcaaaaacatgaatttcttcaaccgccatgctaagttcgctgtctgtcatttcatccagcctggcgccggtcagcacggtttcggaagaaatctccacccgttggcatacagagactgccacgtccacctgatcccccgtcagaatttttggagccacctttagccttttgagcgccgccacggacgctttcgcggttttcttgggtgcgtcaaagaacgccaaataccccatcaggatcatacccgtttcatcggcagggataatctgctttttatatcccacattttttcgtgcaacagcgatgaccttcatcccgtcctggagcatctcatctaccacagcggctacgctctgaatcccgcctttctctatcggcagaatttcaccccgatactccacatggctacagcgggcaacgatatgggagatatcccctttcataatgagttgactttctccgtttctgcctgttacaagagtgctgacaagcttgcgggcatagtcaaagggaatctctcctattttttgatactgagtgagcaaattagtgtaatgcgtttcgcgccctagcatagtctgacaggcaagaattgcgttatctatgggattgtggacgccggaatgataggaactgtttaagaacgccaaatccagtacctcggtattttcattgccgagcacgtccatgtaatattccagcagaatgctttcattggtcagtgttccagtcttgtccatgcaaagcacatccatgctgccaaaaccctgcatagcattgatatctttgataatggtctgcttgcggctcatggtaaggctgccttttgcaaggcaggctgtgatgaccataggcagcatctccggcatcagtcctacggctaccgacagagcaaaagcaaaggattccagccattttccgcctgtaataccgagtagcacaaacacaatgggaaccagtacagccataaagcggagcatgacccaagcgatggagccggccccattttgaaaagaatttttatcatcggaatcaggttttgcaaagctgccgtagagcgtatcttcgcctaccgccagtacgattccttcacccttaccgctgatgactgtcgttgccataaacacaaggttttcaagctgggtcagtgttttctgactgccgcggttatgtgtacggcagttcttttccaaaatggcactctcacccgttatggatgcctgtgagatgaacaggtcagtgacctctgtcagccggatgtctgccgggacacggtcacccgcagagaaaaggacgatatcccccaccaccaattcttccacgggtatttctataagttctccttctcgctttacagtgatgctttcatggagcagccggtcaagctgctttgcagcatttttggcccgtagctcctgaaccagacggatcatgccaccaattaggatcatggaaaagataataatagcagtagtggcgttcttggcgaagttggatgcgagaaagacgtccgtcaccaacgaaatcatacctaggacaaagagaatcacattgaatgggtttacaaaagcccgccgcaaccgatgtattgtcgtatccttttttttcgttatgaaactgtttacgccatatcgctgctgcatcatctcgacctgctcgccagttaagccatctttcgatgtaccgatctcccgatatatttcttctgcttcgtaatatgcgtattttttgatacgactgtcgaacagtgttgatttgggcacaggacagctcctccttaattattataaaaacattctatcatagctttagtataaatgtctcttttaaattcttgcttttttcttgtcttttcaagcctctgagcagtaacagcttaggccaaatttttgtttatgggctttagcctgttgattgtgataacacaaaaatactttggttgttttaccttcttttttagtacctctcgctatctattgccctgatattttatccgttctctcatccattccatttcgcatatactcatactcacgcagcattctcatcagctccagtgcactgcgaaatgaaatatagtttccttcaatacattttccttttatacgcccctgcatactggagaactgccgctgatgaatttcaattaccaacgtctcatatgcggttgtacctatggccataaaccgatccatattttgaatctttgtacagtatttcagtggaatatgctctctatccagttcccgcttctcatatgcttctttcatatgggcgtccaagaatcttggctctgttgtcgccatcggccggtgcaatctcgcgcataatgtatcaatcttcagtcccaagtccagtatgccggtaaattctactggttcctttaaataaaaatttacaatattcccacttagttctccctgcttgtttttaatacaaataagaaacacactcatacggtccgtgtttgccagtgcataatacccgctttcttccatatgtatcaccttatccctcatatttctttcattgataatggctttatccgccttgccgcatattatgattctgccccataatgccatcaagcactatggggcagaattaataccgcctaaggtgtttcccgaatccaagctccgttttcatcgacttggtatccatctggcgtcatctcatttatgtacagggatcccaatggacggccattccggttcgtatattcccatcgcttcgataccttattaaacgtccaagtcttctgctggttatcagctgttagataataccatattccatcaatcttctgccatcccagcaacatagctccggtgaatgggctcaggtaataccatctgccatcggtatcatcatagtgccatccctttgtcattcgaccgaaccagccatcgtgtacatttgacaggaaataccacttgtccgtatcccggtccaggaaccagccgctgtccataacgccctcactgtcaaaatggtatgtggcaatctggctgcttccattatgtgtgtatcgtatatttgcccagctgtctttgatatgggctccgttgttcaatacaaatgcccacttatggttaatcaggtcaaagttatcccatctgccatcggttccttccaaataagtgcggtaaccgttttctgcaccgctattacccggaccacgtcctccgccagaagaaccttttgagccgccgccacctgagccgccgcccgagccgccgccgcctgagctgccgccgccagggttatcgcctccgccaggattgtcgcctccgccggtgttatctcctccgccgggattgtcgctgccgccactgctaatactgtctaccagtgctttcagtgtatcaaaggcattttccaggtcatcaaccgaaggtctgggcaggcggttcagcacttcaacagcctcattcacagcctctgtaagggcatctctgtcttctgcgcttacagacccattattcttcagggcattggcgatattaatctcctcctgcagcctttcttttgcttcctgccattgggtatcgtcttccggctcatagacagcatataattccaaatctcttgtcacaggatctgaagtatcatacatccctcctccagactggcgtttcgacaggcctgtgaactcatacgctatgcctgtaacggaatccgtatagccttcgtgaatatctaaatccatatagtcttccgtatcatccaaagacctgccatcccttaccttaaatgtatgaacctgcccccttccggtatccatgatggtcacttcatacgctttataataactaaataccagagtatcaccgatattagcttcaaaggcaaagcttccggtaaagtcctcattcccattcgggtcaggtgtcatcaggacttcttcacaggtcgtgtctccctcatcctctccaaaattaattttccataacctgtattccagatttcccaaaagactggtgtccaattttccaaacactttaattgccggagtcagattcgcctcctccaccagtggtttattggttccatccacccttcgtgtaagtccgatatccagactccatggtgtcttaacgctctccccgtcatccgcttcctgcctcaccgcttccgaagcagacgccaccggtgcgtgtcggtcgagcttgactgtataagctatccgctgcccgtttgaaagcgctgttctatcctcatcattatcaaccagctcctccttcaattcctgaagtgcttcatctgatttgtccagggcaaatatcccgtttttgggtgaataatccaccgttgcgttggatgcagtcgctacaggaggcgtttcatacatggcctggaggattacatctcccgctgtcatttccacggtctgatttcttctggccgggtacgagatatgcagattaccaatctgtacttcccactgcttaaatgcctgtccagcaggattcatatcctccgcggatatcctaatctgatcccctgcctttaccaggatttcatctgcatgctcttccacatccagcgcttccccgtttcttgtcaccgactccacataacctccgttcaccagacggaaggtataaacacggtcctgctgcgaagtgcctgttaccattacctggctcccgtttatcatacggtctgaaggcgcatcgccgttatctgcctgcttggccacgatggtataggatacattgggttcaagtcctgccagctccgctgtccgcggactgccggacgggcttacccatccatcttcgttcccgtcctggctgactacatttccatccatatcaagaaccgcatacacggtattttctcctgccggacggataacaatcttctttcgtccctctgtcgtatcatccgcgatagaataattccctccaatagccggtaccatgacacgggccggctgacttattaaggatgggtctactgaatctgtcagtatgtctccaacaacaggagctgcgctttccgccatctcatacacatagcagctgtcacagggcggcagttcttcaaagcagccgctgccaagctgttcccctgtcatcactgccaaaagccgtccatcactgtccgtcagggcatatttacgggcctcatttgctccgcttatctcaatcttacccatcccgtcatttcctatagttcctgttccatctggaatgcacaggattccatcatcgcctcccacaggtgtaaaacgagccctgtaagtctgatccgccagtatcggcatattagagtccgtaacctgattcccgttttcatcaaaccagccggcaaacatatagttactgtccggtgtagtctgaggcagggaaatctgagaccacaaagtccctttcggcacatgcatggacctggttcctgaaatagagccgtggcttccgctttcaaatcttatatcgcaccattgtcccgggtcttccacaaaatccgcgtaaagtttgaggtcaccggtcagttcaatatctccggtcaatacggttcctactttacccgtaccggaagcattggctttataccagccgttaaacatatagtgggtttcaggagatggcgtgattccttctgtgattgtatcaatggagtgggtaccaagccgtaaggaacgcgggctgctgtctcctgacaggcttccatgttcgctgttgtaatagtttatcctggcccaatgtgttgtatcattcagatcttcattataggtaatcgtaacagtgccgcctgtaaagtctgttttaaaactcagcgtggctgctgtgtggtccatactgatatcggtaaaagttccattccatccaatgttaggcggatacgtatacccggatcttcgctctacatttaccgtcactgtttcattaggagacacctcccttgtttccggctcagccagcacattgttgtggttgtctatccggttaatggttacacgggttacataagaagggtcaatctcgtaagtatataccacggttaccggctgattaggcatctttccggtaaagttcttttgggcatcaaatgtgcaccctgctgtctgcgccgaatatatccctcttcccgacaaatcatctatatccccgctgcctgtttttatctgagcgccggtaagggtataagccgtaatctgtgccggtgcagcagaaacctgcgactccgcggaatagagatagctttccggagtacggatagcacggccactcccatctgcatattctacacgcagggcaaatttctttgaactgtcaggctcatatctgtatgccacagtcaggtcatcattgggcatatttccgcggacagaccgcgtagactcattaatggtcgcggcctcccccagcgtcccatggcctgaagcgtcatcaaaacggcgcgttttgttgttcttaataagtacagaggataccttatatcccggtatatcccgtttgtaggtggcggataccgctgtattggccgtcacccgggttgtccagcttccatcatcaaaaaacttatatatctggctgtcaccggcttcgggccatgcattcgggtcttctccattcatgttaccatttctgtcctcattcaggtctcggtaatgcatgactgtaaaatcaaactgactggacgtatcaccattccagcgtgcctcatacaccgtggttgaattgtaaggaaacgcaaagggcagatatagaatcttattgccatctgcattataccagccgtcaaaggtatatcccggccagctcaaacccgtgtcaaatataggcagtaccggcctgtcgccggaacccagattttccacggcaattccattgaaatcacttgcttcagccagtggatggccagcctgtccggcagcatacgtaatccgatttccatctctgggaacatttatatagtttgaatgtgataaatccggcccctccttgggatcaaaccgaatgactgccggatccccgtaactcagcgcatacgcctgcgccggaggcgcggccatggttatcaccatggccgcggccaagacacgggccatatatgccttaatcttatttgtcctattcataaaacaacctcctgccgctattttaaagctccgtcagcgcctacctgatagccgtccggtgtcttctcattgctgtacatggaaccaagcggtctttcctgattctgcttaaacacccattttccagtgccgtggtcatatgagtatgtctctaccttattctgaggtgtaaagaaataccactttcctccaatttccttccatcccattaccatctggcctgtaatcaaatccaggtaataccaatgcttatctacctcatcataatgccatcctgtcttcatctttcccagccagccgtcttttttcgcattacagtaataccagttcatatgctcgtccctgaaccagccgtaatccataagaccattcgcgttaaaatgataccagccattctgattcacatcaccattggcataatcaagctttgcccatatgctggtcaggcgtatacctccgttgagcacaaaggcccatttatcgttggacgcatcaaccaattcccagttcccattggttccaactacataacttttactggtttccgcaacataaggcgccggagttgtgacaggcccgcctttgcttcctcccgaaccgcttcctgaaccgccatggcctccgctgccccagccgtctccgccggatgtgcctccgctgtttcctccattctggattttgtcataatgatcatatctgtcttccagaatcttatcgaaaggttcgcaggcttcctccaaacggtccagggcatccagaagttcatccagagttgcccgggggcccgttctgtcgaatacatccaaggcttcctctatggcttcctttatcttttccgtctccttcagcgtcaggaagtaatcgtctgatttttcgattgcagctttgattgcatcctccagctgtttcctggcatcacttacttcaccgctgttgtcatcgtaaaacgcatatacatacgtcttcctcttgatttccttgtccgggtcaaattccttcagccggtcttcccggtaactccagccaatataattaaattcaatcccctcattattaatgaatgaatcgattggtatctccacttggctgtattcaaaggaatacgctccactgcctggtgcctcaccccggcgcactttaaaatgataacggtattttggttcttctttattattgataaaataaatcctgtatgccctggaatagataagcacatatctcattccggcctgagccgtaaatgtaaacaaaccgccggtctcttccggattatcggacatatcaaccggttcaattatcagctccccatcatccggatcctcggaaatagcaaacagctgatagtccatcatgtctacatcttctttatccagctggacatatgtgttaaacgttgcttccgatggcgaagctacacctactttccgcccgttcacataccgttcaatatctacattcaatccccaggctccatggtacgcctcttcatggtcactgtcataatacggcgaactcttaattgcattggattcagtcgcctttaccacattctttttatatactactttataggtcacatctgcatggttcacatccataagggtccggtccgcgtctgtggtaagctcctcctccagattttcaatttcattggggtccagagccatctcatgtttatttcctccccgtacctcatccgtcactgtggcattgctgggtgtcgctgccgcacgctcataataagctgtcataaccacattggaatccggcatggcaaatgtcacatcctgacggcgtatggtttctgtcattccaggaactgacccgattgttaccttccagtacaggaagttctgtccatttccatcggtttcttccgcgtgaagcaccacttcatcgcctttatggacctcatcatatctggggatatctaattctactccatcaacggagtgtacctggccattaatcgcctctgctacatagttggggatatccagttcgccgcccggatctgtgctgatgtgagtcccgtcttccaatttgctttccgcagtgatgccggatgccccatgaggccttgccaccaccacatattcctcattgtaatccagtccggagaaggtcaggcttgccggttggctgccgccggctgactgccagcccccatctcccgtctcaggagttgtgaccgcatttccgtccttatctaaaatggcatagtcggaattcgcatccgccggcttaatcacgaaaacagtcttcccctcatgttcctcatcgtaaagaacctggtaattggtctccactaccgggaccagaacctcagtggcactgcttataattccggtcacactgtctatgggccgcccgggctgtgcctgtgtcgtacctgttgcttcatatattaaataccgcgtaccaggatacaggtcttcaaaatatacccgtcctgatatattcccgcgtaccacatctattatattgccttccatgtccgtgattatatactgatatccctgggttgtcccatagactgtaatcctgccttttccctgagtatcaatacctgctgatgcatcccgcgccgccacatctgtgccaaagactgccgggtccggatagaaccgtatggtataggtagtcccatccacaagtctgctgtcatcttccacaggtactccgccatcataccaaccatcaaccagataattgacctccggtgtataggcaggcagatttcctgtgatgtcggcccaggtacggtcgtattggatatggagatttacgttttccccctcatctatggttccatgctctcctgctgtaaaatgaatatcaacccattggtcaggatcttccccaaagtatgcagtcacggcagccgaacctgtaaacctgctgccggctgaaagcagctcctcaccactatccttgattccgtttccattctggtcgataaaccagccttcaaagcggtaataggtgtctgcagccgcttcaggagccagtctcttttccagtatgtcattccatgtatagctgcctgcagcaccctcatctgttccgtcattgagcagcacggaagctttgtaagttcctccagccatggccgttacatcaggcgatgtattgcttccccggctcaggctcccatgttctcctgcccggtaaatcaaatccgcccattttgacgggtctctgtcataacgataggtgacagccagacggtcgttcggcataattccgttaaaattatggctgctgtcaaaggttcccgcggatgcaggctccgagcgttcagcctggaactcatagccatacagatttttaaactcagcggtcacaggcgtatccgctgttacattttgggtgtccggtcctgtaatgtttctcagcctttcatcctgtgtgccattatccagataatgaatcctatactcatacccctcttccgtggcttcatacaggtacgttatctcaaccggctggttcggcatggttcccgtaaaccttccatcgctgtcaaaactgccccggacagcgcttaccagatgcccgtccgtatcatccgcagcatgtcccgccgtgatgctgcctgacaggtaccggaagccataaacatccgccggagccgccgcaattatatcctccggaaaaacctcctgcacatcaggcgcatggacaaccgtaccattttctgtcacgtatttaactgtaaatgcggatttcgcagctggattgctgcggtctacctgataaccatatttcacggccgcatcctggcccggcatcttccccgagaagttaccggtacttccattaaagtttccgaacggaacgggcccgtgcccatcaccgtaattgtagatagccgggttcgtggaggaatctgccaaactccaggtatagccgtggatgttcttcttccccgaatgaacctccgcctccacgctgtaggcatcctcggccgtggtcgactggaagacgatggaaccgtccgcattgacatagtcaaccgtataatcaaacttcacattactgtccggtgagaaaattgcgtaataagtaaccggatcctccgggaactctgacggcaatccgcttatgagatttggattcaccctgtcattcaccgtgctccaccccacaaactggtagccgtagcggctgatattaggcagcagcgcattgacgcttcctccaacagaccccgtcagagtctgaggctccggtgtccctccattggcttcaaatacaatggaaccgctgtttctggtatattcatacgtgataacaacatcctggcccggcatggttcccgttaccttgccaaaatccacagcgccggcatctgcctgggtgctcagagtgccgcctgtcccctggtcaatggttacgcctgtaaggctgtatccagtaatggcggcgggcgcgttcacctcaaccgcatctcctcccgcatatgacaggggggtgcttgccggcgctccatttacagttccgcctgtggcagaatcccggtatacaaaggacaccgtatatccattccgctttaatactgcattccgcccattgccaagaccttccgttcccgcgcttacatacacgccggaatttcccgcctcctggtccgctttaaaattatccgcaaaggggcaggagcctgcagcccccggataactgattgacggcacggctatctttacttcctgaccgggctgggatgatatccctcccggtgatgccagaggaagctgctctgctgtaacgcctacctgggacgtgtccaaatcgctcataactgttatatatttatcctgagccaggtatacgtttgccttcttcccggacggagttgtattgtccgatatctgattccggtttctgatttcaaatgcacctgacccgttgtaataaacagcgccctttccagcagacacattaccggaaaccgttccaaaattcatggacagtcccgcgcttcccgttacatttaccgcgcttccctggccggactcactgccgctgcagttagtgattacagcgccgctgttaatctccagctttccggatgaagcggatatcagggggtcctgactttccgcatgatttccgtccaggacaaggtcagtaaactttaaagcggggcctgatacgttaaacagcggacccgtatacccggatgcacgcgtcagggttttaatataatcaccatcctcattcataggatgaccctcatggtcataatccgtactggcaatggtaatatccttttggctgtttcccgacacatcaatggcggacgaaatatccggataatccattacataaatataccccttgttatttccaattttattaagcgcatattcaatggttttaaaaggactgctgtaggtcccttctgcgccggaagagtcctggccgtactggtctgatacataataggaggtgtctctaatagcaaatgcaaccctcctgtgaaccgtctcatacggatgaagctggaactcccatgaataggccattcccgaatcagtgctgcttaccacatcattggagctctcattaaatacattgcttccccaggaattgtaatgaccaatccacctggtatcaggaggcgtcaccccaaggctgctgtcatttgtgatacagtcaaaggtagttttgacatgctggttgaccatatgaaaaccccggtcatttttatataccgttgcgtagtcatcctcctgagtgcctccaatcatgacatcggttcctgttcccatttttatggtcctgccagttgagccgccctgaccatttttatcatagacatagtaatcaacaaatacatatttattatccggactcggagatacagcaatcttcacctctatgccataggcgtccagtgattgtaccccgccgtttgtactgcctcctatcagctgtttagcattggttcccacttgaaaccaggttgcataccctccgttactgtaggttgttttaataccggcctgagcataattatgctgccctgcctgcaggcccctaaggtcaaaacgccaggaacttccacctcctccctggccggtcacagaaccattcttccacgtatatgccgtcgcttcgctggccccctctcccaggttttcatccaacagctccgtggatgcataggacagaatgctgggctgtcccataacaagccccgctatcatgcatatggccagcaacatggcagtcagacgtttatagaatctatatatgccgctgttcatttgtttcatctcctttgtacatttttcatctccttttaaaaattcagccgttcttcctccggcaatccatcaatgtcagcctccatgcctgcagctgcgatgagccctccggcaaagtgatcctccttgttttccctgtcataatgatagaaacctgtccccgcctctccttttctccaccttggcttatcctcatctccacaccaagccgcaaaacggtttcggatgatgagcaggtaaccgccattcctatcctttacaatcttcttcgttccttcaatcacctttcctcggacgtctacaacctgataataggtttcctctccatcgttcacctttacaaccccatatccatattcctcatctgcttccaagcggagaccattgatataatacatgccatcctttttttgaagtcgattccggttaccgaacgcctttccattggaggcaaacccaaaatgaaacaccccatcctccagttccaccgcgatatcctttccaatctgcatggaaccatcattaagttcatccggagagaacagatacagatctgatttctcaataccatatatatttccttcaataaaatcctctgacccccagtcatccgcttcataccgggctacaaactcagactttccatcgaagaggacaaaccccgtctgcatcctgccaatcccgtcaaaagcataggaacgtccattgattttgcgaatacggttccgatatacctcgcccctttcatctgtatgccaccagctgcattcctggtcataataatcttccgtatccagattttccgacggatacatccaaaaccaactatctttcagaagcacaccaccgtcatatccggaataataccgggctgaaacatcgctgctgggattactcttatctgcgttgctgatactggccaccttactccaccagggaatcatgataccattttcatcaaaaccatacttggctccattgatggtcttttgtctaagacggtctccattgcttttaaccttctttgaatggctgtcaaaaaaaatccacatcctgtcataatccatgtagtttctccctgcaacctcactgtccaggccggaccccccgattccttcatcaatatctccgtaatccagccactccccggtcaggagccttccatcctcccttgcataataaaccccttcaacaaatggggtgtctgaatcctcaatggggttaccatcctcgtcaaaccatcccgacagcatcttcccattttcgtcaaatatgtaggtactgccccctatatttcttttaaagctgctgttcttacgccggtaacctttcccatctgcgccgaaatagtaccatccttcttcaaaaccatttttggcagtttttcctgcatccgcatatatccatgtatcctgtaccattctcccttcttcatccacatagtaaacagaatccttatccctgaacacacaatgcttcaatatagttccgtcctccgacagataataccagtaatcctttgactttttccatgtcagggttaccggccggttattctggtcataataactccattcaccctccgtcatgttccagccttctgccgcctgtgctgttcccaaaaataaaatcgctgaaaatcccatagacaacgcaaacgctgcaactgccgtcttttttcttctcattccaaatattcctttcctcattgatatctatgataaaccaccgaaattctccatttcgatagaaaacttttaaatctgccaaacttcttccaacacattgacagcgattaacttattgcatgatgattacgaaactaaataaacttttttcttttgtctgccaaacatcaccgcttcctcatgagtgtcgaaataaatatcaatcacatttccctttactaatcccccagtatcttccaccatatagacaataccatcgatttccaccttgctccccataggcagtacctccggatctgccgcaattgtatacccagccttcggggttttctctgtcttagtcaatccccctttcaatccgcagcatttttcacagccgcaataaccagtcacttcaaaagtccctaagggttctcccaaatgttcctctccggattctactttaaaaaccggcattgtctgtctttccgacacagtactgacagccacagccaattcccctatgtatgcttcctggacttcattttcatctattactgcaagtaatccagtttcttgtcctattgatttcatatgaagcacatcgtcttccaggcgaatcgtctccacaatttcttcattctgggccgcttcacattttcttcccaagccactgataataaataccaccatcgcgattccaacgatataaaaggagagatgatgcagcctctcccctctgttttgcttcatcactttctttctaatgtcatgcacccgttttccattgcttgtacatggaaaccagtctaagtcttctctccttttcataactcatcccttatcacattgtcctctgtacaacaaattttctcttttgttgtaaagttacttcaaaattcagtggaaggaaggcgaaaacctagtagacaaagttttttagaatctaaaattcatagatgcagacaatacaaataggccaaccccagaaagaatcagttggccatgttattatgtcgaaaaacatgatattacaatatatattaagaatttctgtagacttctttcaaaatatgtagtaaaataattgtggttgtatgaatgtttttacaacaaaagagaaaatttgttgtaaaagtcaaacaatacttcaagtttttctaattgtctcatatggttgcgtccgctctccattgtataaatccttgttgtattaatattgctgtgccctaatatatccgcaagcctaaccaggtttttttcctgttcataatagagcctggcaaacaaatgacgaaaattatgcggaaataccttatcccataatacatcggctccttcacacagttttttcatgtctcgccatatattgcttctgtcaagtgccttcccgcttcttgtcacaaagatcatcccactgtcaatatgacttttctttgcgtagtccaacaacatataacacaaacggcgagtcaaaaaaacggtccttattctccctttgcattcaacttctgcctttccctgttttaccgcctctatagtaatatagggaacttcagaaactcgtattcccgtagcgcatatagtctgaaggagcatagccattctttcatcgccccttttgtaagcacatttcaccaaacgcttatattcatctctatctatttccctgttttccggacaaaataccttgcggcttaccttcaaaaattttgtccggcaatcctgccatgcattatgcgtcaaaaatccattgactgctgccagtgcactgttgaccgttaccggagccattctctctctcaggattcccttccacataattacatcacttttctccacactcttcccattcatgtattgcataaatagtattaagtaatacttgtattgtttaatggttccactacttttttcacacccataaagccattcacaatatctattaacagattcctgcgtaacgattctttctattagccttccatttcttttcatcacattctgctccttacattatatggtttttataaatatttatattgccctgattatagacgattatccttatcgctaaacaaaaaatgactgttccttttaagcacccatataacaaatttaaaagttgccacaaaatcaccaatataattaattgagttatacctggctctatacacgaaaaaatcaggaagaaatctcccttttacagagttcccctgatttttggaatacattaacaatcaatatacggatgatttttatgatgcttgtgcctcatactgtgcatttttttaatacttcatgatgatctgaattaaaggatgtttcatgtcaataacaatttgtattagattttctcattataaaaatagacctcttgcaattgatatataattctatcacacaagaagcctattttcattttttacaagtaaccgaattctgtctgttaaataaacagtgcggccgctttcatttttcaatctttattttttccctttcaattctccttcatcatttttccgattaaaagtacggataaacgtattcttcttcaggcttcccggctgcttcaatgctctgagcctttaaaatcagagactctccgttctcgctgattccaaatgtacccgttaccgtcacccagtcgtcatccttgaatgtcacttcactgtcactgtccaccagaaaaccaattggggttaaatccgcggcacagcaccacatggacagccggaccagggcaaaatcgcattttttttggatgtccggagtacggaatacaaagcctttcattacaacggtataaccttcatacttttcataaaaattactcaattcatacatccatgtgtagtaatcttcatctgcaatcgtaatggttttttctgcctcgtccagacctcttaagtcataccatggattttcttctccataggactgtccagtatcatcttccggataagcatcggttccgctgtatccatccttttctgtattttccccgtccggcagccctgaacctgcttctccatcggagagcggcccccgggattctcctccggccgccggcaatgtctgcctcacagtactccccgctgtcttccgccccggatttcccgccatccggccgccgccatttccaaaacccatggataaaccggagttctcatagcttctgaccatactgcttcccccaggatcggccgggcggaaggcaagcagcagaatcggaataataaaaacaaaggaacgggccagctttacccgataccggggtgtcagtaagtatcttccggtaaacaccgcccataaaagcattaaagcagacatgccgtaaagatacggcttcatccttggagtcacatagtttaaatacccgcctgaaaaagtaagctgaaacaacaggtatccaaacagcagataacagatacattctgtcagtacctgaaggttgattccttttccccgcagcgtcatatcccgattcctccgcttccccctattataaacacccctgtcacaataaaacagacaagaaatgtggttgcaaaaaggcgtataacaaaaccggatttaaagccggaaagcagcatagcggcatttttgatgtccatcatggggccgaacaccatgaatccaagggcagcccccgccggaagactcccggccatgcttctggccaccaccgcgtcggaggaggaacagagggacagcacaaaggccagccccatcatcaccagaagcgctttccagggcgccccagcgccgcccgcagccactgcctggggaatcatatcctggaaaagtgtggatgcaaagatccctgtgagcaggaatttccccactgagaaaaattcattctgggcgtgcctcatcatcagcgaaaaacgtgacagccgggtaccggtttctgccggaaggctgtaatccacacacaccgcctggaaaggcatggcctgttctatcagataatccgcaggcggtttaaaaagataggttaatccgcagagtacggcacacagtattcctaatccgcatctggccgcgacaattttgtaattgccgttaaacgcataccaggtagagaggatgactaccgggttaatgaccggagataccagcataaaggtcacggcagccggcatgggcaccccctttttgaccaggcttttaaatacagggatagacgcacagtcgcataccggcaggcaaaaaccggcaatcaccgcaaagagctgtcccgccaggatttttccggggaactttctctgaatccagtccgtccttaagtaaacctggatcagagatgaaagcaggacgccaatcgccaaaaaaggtgccgcctgcagaaaaaccccaaggaatatgctgacataccggccgggcggaacccccacttcattcagcagcggaaaaaccatcatatacaacatgaccgcggtcagaatcatcaggaaacaatgccggggcttcatgccgaaacggaataaggcgcgcgcaaaacgatcccggctggtatagacccgaatatccggattgcagttataaagtacatccatgtcattccgattccgccgatgtcctctcagcctgacataagcgcagtcgctccccgcaatctgcgaatacgcggccgctcccgcgtctggaatcctggccttaaagctggcgccgtccgctgcatagaccaccttttcaatactcagtaccgcttttgcggtgaactggagaagcatttcctccagtctatggaaatgctccattccgttccattcaaccaggattaaatcagggctgtgcctgtcaatatagcgagtgattgtatccgcaatgccgaagggaatctgttccagctggttttttgagaataccagttctttcacgcgttcctgttctgtcagaggtgtctctcctgattcaaactggatgaccaggatatcctgctcatccagctcctgttcaatcaactggttgatgagtgtggtctttcccgaatccagcagtccagttatgacccataccggcgttgtcatgttgtttcctctctgaataatgtgcgtatctgctgttcatccaggccggtgcctatgaaacagacctggtttccaactatatttacaggttcaatgcttaaactgcccggcagatagtgaaagaccagtccccggcgtccgtctgtcacaatcccctttcccctgagaatttcccccactgcatgtttcacaacacgcagaaccctttttctcagcggttcctccgtaataggctctttccactcaattgtgacagaagaaaaaacctccctggcaaaatgacggcggataaaaccagccttcccggacggttccctggggctgcggatccgcacgggtttcatggataccgctgtttccatctccagtctgaaaatgccgctgtttcgcgggccataccggaatacggatgcgggaatggattcccaaaagtctgcctcgatcctggcctccggattcagtttccgaagttttgccttcaccggttggatttcatgtacatcttcctcctggcggcttaacaggatcaaatcggcataggcaatctggtcctcaaaaaattccccgtaatttttcctatatttatcaaatgaccgtatatccaccacggttattgtctttttcagatggatgaggcccctgtcctcctgttttaaacagattttaataatatcggataatctgcccacgccggatggctccaccaatacagcatccggtgcgtagtcctttagtatgcgttccatcgctttctcaaagtctccggtcagactgcagcagatacacccgtcgcttaagctggtaacagccaggctgcattccttaagcagtccggcgtcaatcccggcctccccaaagtcgttttcaatcacaacaattttcttgttcctgagcgcggaacgcaccattgttttaatcagtgtcgtctttcccgctcccaaaaagccggatatcacataaacgtccgtcatatacactcctttctgccggctgcctctatcccgatgcccccaggaatgggaagcgaactcatagccgtcctctttcagcgcctgtgtcagcttttttacataggcccggtacggcatcccaggataccgttatatccgctcagagccaggattgccttgacccctcagtaggtggaatccggatgctactcttatcttttttccaatatataaatcccgtccgcaatacctcctgattccgtattgtccttttctctttggccatttcatgtgattatttccgcctcagaattctctttcctgcaaacaccagtatcagaaatatcactcccaccagaacaatcgtaccgcccggcttcaatcccaaataatatgccgcaaacaggcccgtaatcataaacagaacattaaacgccactgcaaaggtaagcgtctggcggtaactcgttccaaactgcatggcgcaggccacgggaaccaccatcatggatgagacgatgagagcccccaccgtcctggcggcgacagaaactgtcaccgcgattaaaacagtaaacaggaagttcaccgtctttacaggcaccccggccagcctggcgctctgttcatccagagacacataaaacagttctttgtacataagcagaaacataagcagaaccgccatgctgacggcgattaccagatacaactccccgttactgattgccacaatactcccaaacaggaagctgttgaaattggctgcatttttaacaaatcccgacagaacgcccgccatgccaatcccggcggacataatgacagcgatggacatttccgaaaacctgggaatcttcctgcgtatcgcctcaatcccaatggcggcaaccacgcaggcagccgcagcggtcaagacaggattcagccccaggatcagcccggccgccaccccggccagcgaggtgtgggacagggcatccccaatcatggacaggcgcttacatacaatcacgagcccgatacacgggataacggccgccagaagaatacctacaataaaggcccgccgcataaacgcatattcaaagatttccataattgttctccttcctgcccggctgaaccggtttcaggctttcatcttctaaaagccagatatcgtccgcataagccatgagccgcttccggtcatgagtgacaatccaaatggtcaccccctgctcccggttaatctgatacagcagccggtaaaataaggtggtgctgtcttcgtccataccgaaagtgggttcatccagcagcaaaagccgcggggcgttcacaagcgctcttgccagcaggacccgctgctgctgccctccggacagccggccaatcatccgttttgcaaaatcccccattccgacctggttcagcgcgctgcggacctgctccttctcctttcttcccgcaaaccggaatcttccgatctgggcgtataaatccgcctggacaagctcctccacggaagcgggaaaattctggcaggatgccatgccgttttgggaaacatagctgaccttctgccagtccttgaactgccggatctcctgtcccagaagttcaatcctgcccctttgtccatttaacggaagttcccccagcatgagctttaacagggtgctttttcctgccccgtttggccccagcaggaccgcaaaccggccctcggggatggtaaaattgatgttccttaatatcctggtatttccataggaaaaatccagtcctttcactgcaatggcatccatcctcagtactcctgttcctgtttttattcaagcgccgccttaagctgctttaagttatcttccattacggtgaagtaatccgcgccgttttttaattcctcgtcacttaaaccctccaagggatttaaaacccgtgtccgggctcctgtttccgccgcgattgtctctgccaccttcgggcttaccaattcttcaaagaagataactttgacatggttcgtttttacaaagtcaatgatttctgccattctggccgggtccggttccgtatcaggggaaagtcccgcgatgcccatctgggtcagcccgtaggtatcgcagagataaccgaacgcttcatgggacactacaatgctcttaccaggcagggcagacagggtatctttgtattcctgatccagttcgtcaaaccggaccgcataggtcttataattatcttcatagtaatccttgttgtccgggtctgccttgacataagcattcttaatgttttccatttctttcttcgcgttcaccggactcagccatacatggggatcgaattggccgcggtcatgttcctcttcctctgcgtgttcctccgctccctcatgttcttcctcatcatggctgtgtcctggcctgagggtaagcccggcggaagcttccgccgataccagacgctttgtttccagactggcaagcacgtcatcggcccagtgctccataccggcgccgctatagacaaagagatctgcttcctccaggttcttgatatcggttgcagccggttcccagtcatggggttctgtgccggccgggaccatgtctgtcacctccgctttatcaccgccgattttgacggcaaaatcatacatgggataaaaactggccattaccttcagtttctgcccgtccgtatcctctgcttcaatctcagcactgaattcttctgactctgatgaagctgcgcctgtgctttcttcatccctgcttaccgcggcggtggttgagacaggctctgtatcagaggcccctggggcggcggtatttccggagcaccctgaaagcacaacagcggaaacaagagccgtcacggtcagtgcgcagaatgtaaattttaaattttttttcataatgatcatccttcctgatatgttttttcacagtgatacataataaatgcgtacacaaaaaacaaggcagatttccagccataatgtccccctgaccgtgcagcctgacgaaaaaagtacgctgacccagggaattaaaaatattatggatagaaaacagccttgccggaaggaagtcttaattatctaaacggatttttaagctgaccaaagaaaccgggcacatatagagtccggtctggtaagatattaagagtttttgagtaatgatatatgcaaagatgacgacggcacctgttcctgccgcttctgttatcaagcggattgtggcagcgcatgcctgaagctccgcgcagacaggacagtcctcacctgtacactcatgttctgtatgtgtgacaataaaaaagccggagagaagcagcacagcggttacaagaaacgctgtcatgaacgcaaagatttttttatgctttaccaaatagctcacttcgtctcctcctttctgttttttcaaacaatctaatatgatttcttgccgctttgtcctgtacctgcccgttcttccatacggaaaccccataatctgaatctgatttttattttaatattataacaatttccaaaataatgtcaatataccagttcaacctaatcagtcaatgccttcttacgagatccaccgtttttccatctgcacgaaagatccgaaaaacaagattttcctccttaataccgctatatgctgaatggtgcagccagccgtctaaccaagttatgattaaacaactggctaacaaaatattacttatagagacacggagctacttccgccgaatccatattggcgctgtcataccacagtgcaccagtatcaacatcctctaccggttctcctttggctgccttggcggccagggtaaccgcctgatatccaatctgtaccggattctgcgtgatggaacctgctaagacaccacttttgatagcatcaagctggatggcgcctgagtcgaatccaacgccgattactttatctactcccagcacctgaagactctcattggctgtcaccaggttcttggctgtaaattcgttggacgcataaatggcaatcaaatcatttttattcagcagggtattggccacagtcacacaagccgcatcatccacggttgccggaatgcctacatcgataatcacctttgctccgtcaactgccttattatacttatcatggcctactaccatgcatttatcttcgccaaccaaggtacgcattttgtctatgaaaccgcccgtccgttctccaatggactgggatgtcgcatcttgggagacaacgccgattctgacctcttctgccggagctgtgaccttatccttaatcatttcatacaatttctccgcggccagaccgcccgctacatagttgtccgtagcggcattggccacaatggagcctgcaggggcatccggcacaccggaatcaaaccctacaatcggaatatttgctgcctgagcattggaaattgcatcaagggccgcctgtgtatccaaagccgccaggcagatggcgcttggagccttgttgaccgcattatttaactgctcaatctgctcagcgactgcactctcactggctggccctacaaaattggtggacttaagccccaaatcctctgcagcctgctctgatcccatctttaccgctttccaaaaatcatgctggaagccttttgccacaatctcaaccgtgacatcgctgtagtccacagccccatctgccttggctgccaacgtatcccctgctgttgtgtcttttacctctgtctccggagcggccgctgctgcggctgtcgtggcaggcgcgctggctccgctggagcagcccattaccatcgtggaaactattgctgcgcagatgactgtacttaataatcttatcttcatgaataaacctccctttattatcccgctttgcgggttattagtgcgtatcaatccttcccctgtttccttctattcaaaacatctacaaatacggctatgatcaacacaaatccggtaatcagcagctgataatgtggctgtactcccacaaagggaaggcctgtcttcaaaacggacataataaaaacaccgattaaagtccccgatatggaacccacgccacctgccagggatgttccgccgattacaaccccggcgattgcatccagttcaaatccatttccggttccaggcatgagtgtggagtatactgctgcataagacacacctgccagcccggcaaacagaccgcttatgacataagccaaagtctcccactttaccacatttacaccggaaagccgggtcgcctccttattactcccaagagacagtatatagcgtcccggacgcgccttgttgagaaggattgccatcaggattgcaagtgtaatcagcagtatgaatcccgtggggatacctgcctgcggaagccctgccccttttaatttaaaaatgcctctgaatgagccgcccggcgcaaaagcctgcggaaaggtcacggttgccgtatttgtcacaatcgaacccaggcctctggtaatcatcatggttcccagtgtggcaataaaggccggaagcctcatgacagataccataagtccattggcaagtccgaacaggcctcccatcagtatggccaggataacgcacagcggcataggcagtcccagttttgtatacagcgttcctgaaatcaaggaacagcagatacagaccgtaccaatggataagtcgattcctccggtgatgattacaaatgttacgcctatcgccataaaaccgatataataggacgaatcaaaaatgctgaccagtgtactgtattttgcaaaattgtccccaaaaatccagaagaacatgaataatacaatcagcgcaatgactgccaccaatttctgagtaccgatagctttgaacaatccattcggctccttttttacctgattcccattatttgacatgtctttaacctcccatttaatctctcagtgtagcggcatgcatgattttttcctgggtagcttcttctatgctgatttctcctgttttacggccctcacacataatcaggatacggtcactcattcgcagcacttccgtcagttcagaggatatcatgataatggacttcccctgctttacaagattattcatcaatgtataaatctcgctttttgctcctacatcgattccccttgtgggttcgtcaaatatcaggatgtcgcagttcctggtaagccattttgcaatgaccactttctgttggttacctcccgacaggttgcgcacctgctgttccacggatggtgtcttggtctttaatgcctccacatattgttccgcggtttctttttccgctttcttatcaataaacaggcctttgcagaatgctttcagggaagccattgtcgtattctcggctaccgttttctcaatgatcacaccatagcgcttgcggtcctccgacagatatccaatcccggcgtcaaccgcgtcctgtgggttcttgatatccacccgttttccattcacataaatatcaccgctgtctctcctgtcagcaccaaagatagccctggctgtctccgtccttccggctcccatgagtcctgaaaaacccaggatttctcctttgcgaagttcaaagcttacatcttttactgttttcccaacattcaggtgttcaaccttcagcaccaccggggcatccggctttacattgctgaaactcttaggctcctcatacaccgtgcgtcctaccatcatctggatgatgtcgtctttcgtggaatccttggttgtcagcgtacccacatattccccgtccctcataaccgttaccctgtcagtaatctggttaatctcatccatgcggtgggaaatgtatacaattccgatatccttggctcttaggtcacggatgattttgaacagctcgctgatttctgaatctgtcagcgcggcagtcggttcatcaaatacgattatcttggcatctgttgagattgccttggctatctcacacatctgctggcgccccaccgtcagcctacccattgtttcccttgggtcaatcctgatattcagtaatccgaacagcttttctgcctcttctaccatcctgcggtcattaatcagctttccgttcattttttctttgccgataaagatattctgggccaccgttaagtggttcatcatgtttaattcctgatgcacaatcacaatgccggcgtcctgcgcttccctgggacttttaaactccacctggcgcccctcatacacaatagtaccgctgtctttgctgtagattcccgtcaatatcttcatgagggtggattttccggcgccattctcacccatcagtgcatggacctcgccctttttaagttccagacaggcattttttaacgcatgtactccgacaaaggacttatcaatgtctttcatggtcagaattacttctcccacatcatcaccttccatttctttactaactgcactgttttggcggaacccatttacaggccctggtcggtaactacccctttttgcagcatgatattggcataaagcgctttctcgctggtggcgataattgcataagctttctttgcctcctcgtagaacgcgaaccgctctatatggccaatggcacttctgcccctgctgtcacacgcttccaccaatgtcatgtattgatcccagatcggtgtttcaaccgtatccccgtccgttaccgacatcaggcagacagggtgttctacgtaggtgtccaggggaaaaagcgagaggattgcttccagtatctccggcacgccgtggccttccatatgtatgacatgggcatccctgcccatggactctgccgggaaattcccatcggcaatcacaatccggtcgctgtgacccatttcacataatatctttaacagttcaggagataatatatggggtattcctcttagcatctgttttcctcctgtttactgtattttttataaccggggtgcctgccggttaccccatatcctttcctcattgagataaggcggtcaatattttccctggatatttcctgtgcacctcccagcattctggcgttaaggctgatttttgcaaagagttccagtgtttccatgcggtaataagcggtaatcacatcagcccccacggtcaaagctccatgattctgaaggagcattgcgtcatgttcccccagataaggcgctatgttatccggtacttcgtaagtggaaggggttccgtaaggcgttaccggaatcgaacccagaccaattaccgtctcaatcatagagtactcgtccaacggcacattggctaccgcgtatccggtggccacaggcgggtgggcgtgaagcacggaatttacatcctcacgctctttatagcagcggagatgcatcttaatctctgaagagggcctgtatccgggaaggccttccaacacctcgcctttcccatcgatacgaaccagtttttccggtgtgatgaaacttttgctcattccggtgggagtggcaagaaaggttccgtcatccagcctggcggacacgttgccgtcattggctgccacccagccaagctgccacatcttatggcacacatcgcaaatctgttcccttagttccatatagcttaattccataatacctccttattttccaggttgtcccggtctttggtcattccagcatctttttatattgtccgtatacctgctcccattgatctgtatctttcggctcatagatgcttaccttggcggaagcccctgcgacacttctcacctgatccagatccctaagttctcctgttgcaagcagctgcatagccgcgttacccagtacagtagcctccaccggtccggcaatcaccggacaatgacacgcattggccgtcatctggcagagaagtccgctctgtgttccgccacccaccatatggatagccgggtactctcttccggtacacatcttaatttcttccaatgtcatgcggtacttaaacgccaggctctcgtcgatacatctcacaatctccgcctcattttccggtaccctctgtccgctttcacggcagtatctccggattctctcaggaatgtttccagccggaacaaactctggtgcatccgggtcaatcagggctttaaatggctttgcatccgcggccatttgctccagatgtccgaaactgtattcctttccctcacgaatccactgtctcctgctttcctgtatcagccacaacccgataatattcttgaggaaggaaatctttccctggcacccgccttcatttgtgatattcagccgttctgacaacccgttgataacaggttcgtccagttctgtgccaaacagcgaccatgttccgcagctgatgaagatgaaatccttatccctggcaggaacagccgcaagggcactctgcgtatcgtgtcctgccacagcaatcacttccatgggctcaattcccagctcctggcaaattccgttttttatgaaaccaagtctcgttccacatggaacgataccgctcagaatccgttccgggatacctaggctctccaacacttccttcgaccacatcttagtacgggcatccagcatctgcgtggtggacgcgatggagtactcgctgacctgcgccccacatagataataattaaataagtccggcatcaacagaagtctggaagttccctccagaagcccgggccgcttttccagcagagccaaaagctggaataccgtgttaatctccataaattggctgcccgtaatctgataaaagcggtccttatccatctttccaaaactcttttcaagcatccctgcggtccgcgcatcccggtagtgcaccgggttttctaaaagatttccctccttgtcaatcaggccgaaatccacgccccaggtatccacgccgatgctgtcaatctttccatacctctttgctttcatcagtccctgcttcacttcataaaacagccgcaggaaatcccagtacatggttccgtttaatataaccggatcattggggaaacgatggatttcctgtatagataaccggctcccatcaaagtttcccagcattacccttccactggaagcgccgaaatccactgccagtacatttttatggctcatagacacaccgccttacttatataaaggcccataggccgcacaggcacggaaatcctgtccctctttgtccattccaaatgcgttccaggctgcaggacggaatattttttcctcaggcacattgtgcatgctgacaggaatccttaagattgagcagagtgtaatgaggtccgccccaatatgtccatagctgattgcaccgtggttagctccccagttattcatcacgtcatacgcggaggcaaatgctccccggcctgtcaccctgggcgcaaaccaggtgcacggccatgtgtagtccgttctcttccataagatgtcagttacatcgtccggcagtttcacggtccagccttctgcaatctgcagcataggccccagtccctttaccaggtttaagcggatcatcgtacatggcatctgggcttctgtaacatatctggaagaatagccgccgcctctgaaatacccaaaatcagcctcattccatgtggttgcttccaacattgccttctgatcgtccgccgtcacctcataccatggcttcatgaccggctgaccgtcttcatccagggctttacccgtggcatccaaacaggccgctccggaattgatcagatgcaggaaaccgcctgcttcctttgcgaccccttccaaatcatatccggctgccttcttaacagcctcagggctccagtacgtacgcacatccgcgaaaatctgcgccctgttggtgagcagcttcatgaacagcatacccagcccatttaatgtgtcattctcagtagccagtatgtatggctcccttgcgccgttccagtcaaaggaggaattcagcatggactcagcgaagtcaccattgggataaaaatctgtccactgtctctgtccctggaagcctgcggcaatggcattgtgtccgatccgctcttcctcccgcccctctggcagattgggattcccattcatcaaatccttgatgatgcacatcatcttaactacgaattcccaatccctatccttctgttcccgggtcttctgaacttcgggagggttcttgtcaaagccttccttacagtttgcctttgtccatgcaagggccttttcaaactcttttttatcgtatatttcctcactcatacggcggatcagttccacttcgtctacggattccacccgcatcccgagatattcctcaataaatgccgggtctatgatggaacctccaattcccatgcagatagaacctatctggagatatgactttcccctcatggtagcggcagccactgcggcgcgtccaaaacggagaagtttttcttttacatcctcaggtatacttgtatcatcagcatcctggacatcatgtccatagataccaaaagccggaagccccttctgcgcatgggtagccagtacagaggcgagatatacggcaccgggtctctccgttccgttaaatccccacacgcccttgattgtatgcggatccatgtccatggtctctgcaccgtaacaccagcatggggtcacagtcagggtaatatccactccggctctgcggaatttatccgcgcaggccgcgctttcccccgcccgtccaatggtggaatccgcaatcactacgtttaccggttctccattgctgtaaaaaagattttccctaaacagggccgccgcgcttttggccatattcatggtctgttcttccatggattcccttactttcatatatccctgtcttccgtctattgtgggtctgatgccgataaccggataagacccaatcaatctgcttgctgccatagtgttttcctcctttttaattttagattgtgttcgctttaacttatttaagttctgtatttttgtgctcctcttgcgtaattgtattatactattgatatatagctatttgctgtgatataatggcaaaaaatataacaatattcatttttttagacattttatccatttatttactttactgttctgtatttatagttatttttacatttttaggagggcgcagtatgcactatttggactataatgaaaaaaagcaacacgggactccggattttcctatcgaatattaccatgtagacgagcaccatccccgttataacatgccattccactgtcataaagagttggaaatcatccggattttggagggaatcctctatttaaagttagatgatgaagaatttgaagctaaagctggggatattatttttattaatgagggggttattcatggcggtttacctcataattgtatttatgaatgtattgtgttcgatatccagcgtctcctcatgcacacagatacctgtcggttttatatccgccttattacaaagcatcagattatcgtacagaatcattttacaaaaagcaaccgttccctgcatcaaattatcggccatcttttcatatccatgcagcatagtgagcctggaaacgaattgataactatgggcactttatttgaaatttttggaattatctaccaaaaagggctttatcaggataaggctgatgatacaaaatcttccagaaagatgatgcagctcaaacctgtgctggaatacatagatagtaattacgggcagactattacactgaatgaattgtccagaattgccggaatgtctcccaaatatttctgcagctatttccattctatcattcacagaacccccattgattacttgaactactatcgtattgagcgcgcctgcagcgaattaagtacctctgatttaaccttgacagaggtagcctatagatgtggttttagcgatgtatgctactttatcaaaacatttaaacgttataaaggaatcacaccacgccggtatcgcctaaatattggatagtatctaatctttcataagtatgccgacggataggttccgctccctgagcttaccatgtagccatcaatacatgttcggtaagctccttcgctatttggtatgtggattttccaaggttttccgcctgtttcggatgcattaaggtcagcttctgctgtttttcaatggcacgctcaggtatccataacttaagatcaagatgtttccatttgaccaattaggtactgtgaatccaaattatccgcctcagcaagcatgataataccaatttcattttccaggctgctttcgactatctcttgaacctgattttttttattacgatattgggtatccaccgcttatgtattttttattatttcttacatatactgatgatgagctttatagcaaaaggggaaaactaatctgaaatttttcagaatcggttgacactttccctaatttttgctatattatgctcagtgatcgtgttgcggaaacttgcgaagcccgtgaccgggggagaacctgcgggtctctccccttttacatttaaggagaaactatatggcaacaaaaacattttcctctttccaggatcaagtcagatggctaaaggatgagaaacagcttattatcactgaccctgaatatgcaaaagaaaccttaaagcatatcggctatttccctttgatgggtggatataaacacctgttccgcatcccactgacaaagaaatataaggaaggaaccacatttgaagaaatcgttgccttgtacgaatttgattcggaactaagagaattatttttcaagtacctgctacagatagagcggcatctccgttccctgatctcctattatttttccgaaaaatacggggaatctcaaaatgcctacctgaacatcaataactataataacagccagcgcaaccaccgcacagtttcaaaactgatttctaccctcaatcgggcggcatcgaccaccgactatgactatatcaattattaccgtgctacatatggaaacataccgctttgggtgctgatcaatgtccttacgtttgggaacctgtcaaaaatgtaccaggtaataccccaatccttacaatcgaaaatatgtaaaaattttacagccattaaccagaagcagatggagcagttcctttctgtccttacaaaattcaggaatgtctgcgcccatggagaacggctttttacttaccggacaatagacaatatttccgacctcccactgcacaggaaaatgtccatacctttagtgggaatccagtaccaatatggcaagaatgacctgtttgccgttgtcattgccttccgatatttaatccccaataaagattttcacgttttccaaaggaagctgtcgcgcctaattgataacgtatctgcaaaccttacgcacataaacagcttagaattgcttgagcgaatgggatttcctcaaaactggaaaaaaataacccgttatcgcctgactccataaagattttcctgcatacatcagccatacttcccatactcccgcggttattccaaaatgagagtatggttttgatttttatatgcttaattatacactaattctatcaggacactttcctctgccattgcagtcaaattgttcagatgtgccgcccatgccaactggtctttttcctttctgttagcatcatgctctgataccagttcttcctattttcttttaaaaatgttctccgcaacataccatattttccgattgatacttcctcctcatcgataataagatctggaaacaggtaatctcctctccgataataattcagttccattttttgttcctttcagatggagtatgtgcaacaccataaaatccaagttcacaattatgtacttcacttattttgtttattgcatcatcttacataatactctttctctatttccttattatcaaccgatgccatttatggactaaatgaagcatgacatatcaaaattattcgttttctataaaacagtaataatattgccacgatagttaaaatcagcaacggaactctggtatatgaaatgctatttataatattgtccggtttcaatgaacgtggataaaatagcttccagaaaacagaaaatcccctggtttattacccaaaccaggggatttcatctacactcttgccgtttttgcccttaaattcacaatcgaaaaacgacccaattttgccaacctttcggtcgtaagccgcaatatattgcggttatatatgcgtcttattctaaaaaaccacaagtatcatctatatcacaacttaggcctcatcaatcgccttcccaatatcatgcctcatatacttattcccaaattccacccactccgcagccttataagcattctccctggcttccttcagtgtattaccttttgccgtaacccccagcacccttccgccgttggtcactacattcccgtccttatcgaacttgcttccggcatggaatacataatacccgtcctgaccgtcaaaccggtccaggccgtctatcttatatcccttttcataatgctccgggtatccgtccgatgccagaaccacgcatacggctgcattgtcctcaaactccagctctatctggtccagggttccgtccacgcaggcttcaaacacatccacaatgtcattcttcatccttggcagaactacctgagtctccggatctccgaacctggcattgtactccagcaccttggggccgttttccgtcagcatcaggccaaagaagataattcctttgaactccctgccctctgccttcatggcgtccacggttggctggtacacatactttctgcagaatgcatccacctcgtccgtatagaatgggctgggcgaaaatgttcccatcccccctgtattcagtccctggtccccgtccttggctctcttgtggtcctgggccgaggtcatgattttgatagtgtggccatccacaaaggagagcacggaaacctcccgccctgtcatgaactcctcaatcacaattctgtcacccgcggagccaaactgtttatccagcatcagggtcttaacgccttcctttgcttcctccctggtgttgcagataagcacgccctttcccagcgccaggccgtccgctttcagcacgataggcatgggagctgtctccaggtatgtaagggctgcttccggggaatcaaatgtctcataagcggcagaaggaatgttgtacttcttcatcaaatccttggaaaatgccttggaagcttccagtatggcagcgtttttcccggggccgaacacgcggatgcctgcatcttcaaatgcatccactgcgccggccgccagcgggtcatccggtcctaccaccaccaaatcaatggcctgctctccggcaaatgcgaccagcttctcaaagtccatgacgccgatgtcaacgcattcagccaccttggcaatacccgcgttgccgggagcgcagtaaagcttctccaccttcgggctctgggatatcttccatgcgattgcatgctcacgtccgccgcctcctactatcaatactttcatgacgttcctccttataatgaaaacatggcacatatggtgcgcgctactgtcaaagagatgctactgcccatttgcaatcatgttgattgccctgggaaggattacccactctgcctgctccatgacccttctctgcagaatctcaggggtatccccctcctccacctccactgccttttggaggataatggggccggtatccatacctccgtccacatagtggaccgttgcccctgtcaccttcacgccgcgagccagggccgcctcgtggaccttaagcccatagtaacccacaccgcagaaagagggaatcagggatggatggatattgatgatgcgtcccttatacttctcagtcatggccgccggaatcatcaccaggaatccggccagtacaatcaaatccaaatcatattcatctattttggcgagaaatgcctggttgaacgcatccctggccggaaactgttttggagaaatgcagacagcccggatcccatgctttctggctctctccagagcataggcccccggattattactgatgacaacggatatctctgcattggtaatatcaccatgatccacggcgtccaaaatagcctggagattggttccgccgccggataccagtacgcctactcttagcataaggacacacccttctctccttcttcaatggagcccactgcataaggagcttcgcctgctgccctcatggcttccatggttttctccacatcagcagggttaacggcaactatcatacccaatcccatattataggtattatacatcatctgctcttcaatctgccctttatcagccagcagcctgaatacaggaggaatggggtagctgtccttcctgatgacagccttcacgccgtcttttaacatgcgcggaatattctcatagaagccgccgccagtgatatggctgcatgcctttacggtaacgcctgcttcctttacatttctcagagccttcacgtaaatcttggtgggggcgagcaatgcctcgcccagagtggtccccagctcatcataatatgtgttcaggccttcctttgtcagctccttctcaaataccttgcgcaccagcgaaaagccattgctgtgtacaccggaagaagccattccaatcaggacatcccccgcacacaggttctcacctgtaatcaggtccttcttatctacaatacccacagagaatcctgccaggtcgtactcatcctccggataaaagcccggcatctctgctgtctccccgccaatcagggcagaaccggactgcctgcatccctcagccacaccctttacaatcgtggcaattttctccggaacattcttgccgcaggcaatataatccaggaagaacagaggctcaccaccagcgcagaccacgtcgttgacacacatagccacacagtcgattcccactgtgtcatgcttatccatcagaaatgccagtttcagcttggttcccacgccgtcagtaccggacagcagagtaggctcctccatccccttgaacgcggacatggaaaatgctcctgaaaatccacccagaccgcctaatacctcagggcgcatggttccctttacatattccttcatcagttccaccgatttatagcctgcctcaatatcaactccggccttcttgtaatccatcatggtttttatcctctcttatctgatatttcctttgccaatttcctttaatccgccctatttcatctgtgcaagatattccttgtagcccacctgctccagctttccggcctttttcaccacatcgttcttcaggctttcagaatactctttcagctttgccagcagctctgcatcggagacggccagtatctttgccgccaggattccggcattggcaccgccgttgatggccactgttgccaccgggataccgcttggcatctgcacgatggaatacagtgaatccacaccgcccaggtcagatgtcttcataggaattccaatgaccggcatagagaaaatagccgcacacataccgggaagatgtgcagccttgcccgcacctgcgatgattaccttaaagcccttatcctctgctgactttgcccagtcaaagaatacatcaggctctctgtgcgcggaaataattgtcatctcgtaatcaatgcccagcttgtccagaatctcagccgcctttgccataataggcatatcagagtcgcttcccattacaattcctacttttgccattatttattctccttttctaaagctcattatccatgtagataattattattagtttatcttataagtatctttatatagctcaattctacttataatcataatactaggaaatgcttatgccgtcaatacaaaacttgaaaaaagtacttgaaaaggtctcccgcatttttgaatgttttttataatgtattctcctgaaacccactgactcctgtagccgccagtctctctgccggccaggcacaggcaggcagctacagccagctccgcaatgggaagtctgcggcgtccctccttcctgatatagtctaaattgtttctcttttacctagtatgactctattttaataagtttacattattatcctgaaatggtataatacttatagaccatttcaggaggtaaaatgatgccaaagagtgctacgcctatttttctttccaatgatgataagtcatatttaaagtccattctacagaaggggactgttgaagccagagtccacaggagagccaaaatcctcttattaaaatcagatggcatggcagatgaagccattgctgacaaactcgatatttcgagaccgacggtaaagctctgcctgaaaaaatatatggaatcaggcgtaaaagctgccatggaagacagtaaaggccgtggccgcaggattgaaattaccgatgatgcaaaggcatgggtaatcaatattgcctgccaaaagccttccgcattcggcctcccggcagagttatggtatccattgagccttacccgctacatcaattccgttgctgaacaggaaggatatccccgtatggcgacagcatctgagttttctatccggaagatacttaggaaagcaatgcttaatccccataaggtcacctattattgtgaaaaacgggatcctgactttgaaaagaagatgcatgatgtgctggtcatttacaaacaggttgaactccgctttgatgaaaatggaagtttgattccgtttgccggtgatgaagagccggtacatacattatcctatgatgaaaagcccgggatccaagcgattgccaccacaaccggggacaggcccccggctgccagtacggaaaaaatgtccaccgtacagcgtgattatgagtataaacgtctggggacgctctccctattggcagcgattgacctgttgaccggggaagctatcccactggtaagcaatactcataaaagcagcgattttgtaacattccttaaaatattggatgagaaatacccaaaaggggacaaaatacggcttatactggataaccactccgcccatacatccagggagacacaggaatatctgaatacagttcctggaaggtttgaatttgtgttcacacccacacatggctcctggctgaatatggtggaaggctttttcagcaaaatgacccgccagatgttgtccgggattcgtgtaggctcgaaagaggaactaaaggaacggattttgaaatactttgaagaaatcaatgaggttcccgtcccctacaaatggaaataccgcttggacacgattgatctttcggaagaggatgtgggcacaatcgtctatgaagttgtaaatgcgaaagcagcaagtcctgaaaaccaagggaaacgtgcgcccaaagcacggacacgtaagccaagaaatcagattactaccaatgcttaaattgtaagcttatttaaatcgagttatactagtataacagaaaaaatcacttgttctatccgtaaattggattgtccaagtgatttttcaacaatgagcacaccctcccctcatccggaacagtgtctccctcatctatcaaacaaacattctgttattttcaaacatgctctaacccgcttactcagtcagccgcctcgtccaaagccccattcagttcctctgtcccatccagcacgaacctgccctgacggatgatatcaataccgcttccgtctgccctcacagcctttatatcccctaattccgaataaggaatggtgatatccgtgtggcagctgaaatacgccttggacatatccgtctttctgagaagggatatttcattatccctggcaatgacctcccggccgtcagggttatacatgggcgaatcctcagcaaagctgtagcaagtatcgcctactgcaaaatgaggccccatcttctcggcaataaggataggcagcttgtcgccaatggaaaaccttctggccatggcgtaggccgtagtgttggtaccgatggcgaactcgcccaaaggcagccagtcatgattccgcataatgacctgctttacaagagcctggccctgtctgcgggcctctccggcagttccggcagtctcaccatttccggagtttccgacgctcccggcagccccagcggcctcaccatttccggcgtccccggtactcccatcctcctcaaaattcccacaggaatactccgtcaccttaccgtccttaaacaccatgcgcagattcctgaactgataatcctccacataaacattctttacgtgcagcagtccttctgtccccttcaaaataggggatgtaaaaacctctcccaacggaatgttcacatcggacacacagttctcaaaattggtctccttttccctgtcttttaaggggtggagggataccttcatggatgtctcattgccgccgcggcccgttatgagcacatggctggcctcatccagcgcccggatgatacgctgctgaattttctggtacttctcataatccagtgtattgattcggatggtttccctgaagacttcttcaaactccggcccaatctcaggtttgggaaaggcaataatggtaaagctggtctcgtctcccggcatatactggttcacaatccgcctggattcattggcataagccagagtcagcgcctcctgatgggcgttgagggccagagccgtctttttatttacaggcgtgaagccttcctcaccaaatgtctccaccagggcagggcccgcgcaccaggcggcttccttcctgcgggtctcataggcagaccgcaggacggccagcttcctctccttaaaagcattgcccatataaagggcgctgtcataacgatggtcataatcatactgcttgttgggggatgtgccgtaatatcctctgcgtccattggccccgcggttcacggactccaccgccgccctgtaacagatgggttcaagtcccatctcccgaaagtactccaccgccctgcgaatcatgcgctcaaatcccagctgaaattccaccacaacggtccgtttcttcttcaggtccctgcccatgacctggaaacccttcctgaatccttccgtataagtggacgccatctgatcaatggtctcctggggaaggctgttcatgaaagaggcaagctttatctctgtctccgaaacatattccccgtaggcatagagataccgcaggtcagtcaaatcctgctccatcacaatgtctgtcccaaaggaaagggccgggtccagtccctcacgaatccgccagtccactgtgacctccgcatagtcgctgacaaaccagtacagggaatccttaatcagctgctcctggggcgctttccttccctcctcccatgcctggtcaaataggttatatacttccaggaacagctcgttcaggatagtgatattcataagccgcatttcaaatgcatatacgatgtcagcccggatttccgtataaagaaaggataaaagctggccatagccatcccccaaaacctccaccgcgtaatccggattggtgaagctctccccgtaattctcaggcagaatatcctggtacagggcatgattctcctcccgcagttcctccagggttaaaagagccccatccagcccggcctcctggcttaagccggtttcttccacccgctttgccagtctctctatccggcggataaatgccgaaaccttcttaaaataacagccgtaaggcagctgcatctcctctgtgtccatggacctgatacgctccatggacaattcgtaacgctcccttacggcatcattctcttcctgtaataatattctgtaatccatctgcatctactcccatctatcttacaataccggttatgataatcacagcccacacgatgaccagcaccacgctgatactgattcctatcttcgccagtatgtaattgcggtccttttccataaatgagcgcgccccgtaccacagccccataagggccgcggcaaggctggaaaagccataagcccctgtattcaggcctccctggcctgcccttgtcacagacagatacatgctggctattcccaaagccagtcccagcaccgcaagtatcagacagcagtagctgtttctcgcaaaaggatttctaacatacgataccttatcgccaatctgcctcaacgtgaaagcctcctttttctcaatttgcaccgggtccactgcaccaggcggtaacacagatagcctgcggctgcccccagggtgttgaggaacatatcatccacatcaaagctccctaccttgaacaccagctgcagagtctccagcatcagactgaaaacaaagccgaacataaccgtgttgtaccactttttgctgcgtctgctgattatggggagaaagaacccaaaaggcatgaaggccgccacatttcctatcatgttaatcatgaacaatgtgggccccagcacgtcataatgacggaaataccgcatgatttccttaaagggcaccagattatactggtaccccctgtctgtgtccgtgcgcccaaaggattctgaaaaaaacatgaaatacgccaggaaacaaagatacagtatgaacaatacccatcccagcttttgacgctttgttgtatttcttatcattgtcagccccgcttactaaaattcaatttcggattttcgtttcagcagcagcgctccatttacaatagaaatgattccaaccgtaaggccggtcacggctatgatgactcctaacgctatgcagccagcccctgtgttacgcatggttttatacactctctccatattcatcgcctttcttcctggaaacatcattatgcctgggctccatactgctcatagtatgcgtcgatggcggcctttatctgatcgtcgatgactaccttgccatttatttctttattatagaggtgctccaccacatctgccatggatacgatagctgctgtggggaaaccatataaatccttaatctcatccagggcgctcttggcgcctttgccgcgctccatacggtttaaggataccatgagtcccttgatttccacatctccctgggccttgatgatggggaatgtctcctcgatggactttccggatgtggtcacatcctcgatgataactaccttgtccccgtctttgatagggcttcccaaaaggatgcctgtatctccgtggtccttgacctccttgcggttggagcagtaacggatatcttttccgtacagctcgctgatcgccatggtggtcgcaacgcttaatggaattcccttataagccggcccaaagagcacgtcgaaatccagtccgaaattatcgtggatagcctttgcgtagtactctcctaatttcctcagctgggttcctgtgacatagcttcccgcattcatgaaaaacggggacttgcgtccgctttttaatgtgaagcagccaaatttaagcacattgctttccaccataaaatctataaattcctgcttgtagttttccatcttccttaaacctcctgtatttacgggtcatttaacctcttacgtgcctttttttcctgtcttacctggccggtcctacctcacagcccctataagttcccggatatccccgattccgtacttctccatatacgcccggattccatccacggtctccaccgtagcataggggttatggaaattggccgtgccaatggcaacagccgtggcgcccgccagtatgaactccagggcgtcatctgcattcctgattcctcccatgccgatgatgggaaccttcacggcccgggcagcctggtataccatgcgcacagccaccggctttacagcaggaccggacagtccgcctgtcctgttggccagtgctaaggctcttttgtgaatatcaatcttcatgcctgtaagggtattaatcaaggaaatggcatctgccccgccggcctctgccgctctggccatgacagtgatatccgtcacgttggggctcagcttcatgatgataggctgctttgcatgtgcctttacctccctggtaatggcctcaaccgccttggggtcctggccgaaagcgattccgccttcttttacattggggcaggatatattgatctccagcatatctgccggctggtcccccaaacgctctaccacatcaatatattcttccgtggtctttccgcagacattgacaacgattttcgtgtcatactgttttaaaaagggaatatccctctttgtaaacacttcaacgcccgggttctggaggccgatggcattgagcatgccgccgtatacttccgctatcctgggagtgggattgcccggccacggcgcacttgccacacccttggtaaccactgcgcccagacggtttaaatccacaaattcactgtattccatgccggaaccaaatgtgcccgacgcttccattaccggattcttaaattccacaccggcaatatttacactcatattcatctaaacggtacctcgctatctttcacctatacatgcctacagctcaatctcatctgaccggaacacaggaccgtccttgcatatgcgcttattgtgcacctgtgagtggccgtccacctctttggaccggcacacgcaggccagacaggcgcctactccgcaggccatcttctcttccagggaaagccagcactccagccccttttcggccgcatatgccttcagcgcgcggagcatgggagtgggaccgcaggcgtaaatgacatccgccgtaaggccctgctcacggatggcgtccagcacattgccgctggtgccaaagctgccgtcctctgttgcagcgtataccggaccgtatgcctcaaattcatcctttaagaacatctggctgtccctgtatcccagtacggactggaccaggctgtcctccccggacctgttaagtccatgaagggctttggccaattccagcatgggaggaacaccgatgcccccgcctatcagaaacgccctttttccggcctgcaggggaaatccattgcccagaggtcccaggacatcaatggtatcgcctgccgcgagtccggagaactcctttgtgccttcccccgcgatgcggtacaccagcctgagttctcccttttccttatcaatgccgcacaaactgatgggacgcggaagaatcctggccccgtcctttgaataaaggcatacgaattggcccggaaccgctgactccgctatctcaggcgcttttatcctcatatcgtatatatcggcagccagctgctcctgaagcgtgacggctgctgtcattttcacttttgccataacatgcatctcctgtctcttacagtacgctgctgatatcagcagccatgtcaatcactgcctgtctggatgcctcaccgaagtgctccggcccgaatttcttgtacttctcctgtttgtaggccgcgatgattcctctggaggaattgaccacagcgccaagcccgtcctggttaaaacaatgcttcaggtcagcggctgttcctccctgcgccccgtatccgggtaccaggaaataggtgtggggcatgagctttctcagaatcccgctcatctcaggataggtggcgcctaccaccgcgcccacattgctgtattcaccgtccatgcagtcggagccccactcctccaccttggcggccacccactcataaaggggctttccgtcaatcaggcggtcctgaaattcaccgctggacggattggaggtcttgaccaggacgaaaaggcccttgtcctcactcttacatacatccacaaagggcttcacgccgtctgttcccagatatgggtttacggtaagcatatccacattaaatccgcttaaggatttgctttccacctgcaccctgccaagatggcctgctgcataggcagcggatgtggagccgatatcgcccctcttggcgtctccaatgacaatcagccccttttcatggcagtagtccacggtcctcttatatacggtcagtccttcaatgccgaactgttcatacatggcaatctgcggctttacagccggaatcaggtcaaatgtgtggtcgatgatttccttattaaactgccagatggcatcagcagccccttccagtgtctccccgcaggaatccagggatttctttaccacatgctccggtacataggacagcatgggatccagtcctacgcagattggggcattggttttctttattttttcaattaactggcttatcataatgttctcctttgttgagagttttttcactttgcatgaattctttccccattttatcatataaagtaccttgtttcaaggaatgatattccagtattgcaattattttaacggacccgtgaaaggcaaaaaacagccgggcagaaaaacctgatatgttatcagttcctgtccggcagtaattttctgctgcctcaacgctgccttactgctgcttcactgccaatccagcgctggcaaatccgttttctatctccatggtattatctattatatcgtcaatccggtcaaaggattccctccacgcctccacccctccttactatacaaacgcggggaatcagagtactcctattacggtaataaatacaagaacgggtgatacgctgtaccggggaaatttttatttttccaatcaatccgcttacaccgtgtcaattgttgataatggctcccgcgttaccctgtaagttctgcaggatatggacgcatcttccagcgtatcaatcagttttcctatacgggatttcgcctaatcaaccaaggcacataccgcgcagccgtctccgagtccttgccttgtacgaacaacaattcgattataatgaccgaggactatgtggaatgcaataatacacgcattgcaattatggatacagccacatttaatgtccagaatggtgtaacctataccctgtatattataggtcttgcttaccaatttccttctctgcggattttacctttagaaagcgatctgatatattaaatgaaaaggagcagctggaaaatattatttattgaacttaatggcggcggacaatttcaaaattgttcgccgccgtcaagtctgtactggctaaagccataaataaaaggcaccatctgcacgttccaaatacattctagtggattgcatcctcaaagaattcgtatgcttctttatccgtaaatccttcatgcacaatctttccgattgctgccgccatctccagcgagtgaacactctgaaaaatatttcttcccatatccacgccatgggctccgccgcttattgcattgtaagccagggtcagggcttccttctccggaagcttcttgccgcctgccactacgatgggaaccgggcatgccgccacaacttcttcaaagttttcacagtaataggttttaatgatgttggctcccatttcagcaacaattcgggtagccagcttgaagaaacggtccgtgcgctccatctgtttgcccacggccacaacgcccatggtagggatgctgtatctcattcccagattgattgcctttgaaaggttctcaatactggacagctgtccgtcggcgccgatgaaggtctggattgccatacagtctgcattcatacggattgcgtcctcaatatcaaccgccaggatttcatgggacaggtcgtcgttcagcatggaggaaccggaggtggagcgaagggcaatgcccttgccgcacgctggtgtcacgcatgaacgcagagcgcctctggtccccataagtacatccacatagggaagtagcttaggaatcaccaaatccagacgctccagtccggcagttgaccccataaagtatccatggtcaaaggcgaacataaccgtgttcccactttggggattaaaaatgttggacagatgttttttcattccccagtccaggttgtttgctcctttaacatagaagccatcgttatttgcaaagggtacatctacgtggtaatccttcgcaacctttacaccttccaaatcagccataatcaaaaatctccttccaattcaattaatacaattttgattgatttttaagcttagaagttataatcattcatattatctgcgttaaatacggtgcgttccggcagcagtacaacgccgttgtttacctctgcggtagatgcgccttcaaccaggctgtcattaggcataacctctacctcgccgatgtcagggatattaatcttgtcgcctacatgtacttcattgcctgctgcaaggtaagctgcaaggtagcagcccattgcgccctgtacgccgcagtcccagaggccccactgctcgattacgcctgctgcacagtaatccttaatggacataggagatgcaaaacctgtaattgtaacgtcgtccttggtcagccccttgttctgagctgccttgcactgtcccggaagcgcggtggagtcgttgcagatgatcaggtcaatgtcagagtgtgcttccagaatggatgcgccgatggaaaccgccttctctgcatcctgctctgaataatagttgtcaggagctacattttcccagttcgggaagttttctttgatataggcttcgcctgctacctgccaggagttctggtcggcaactgttgcctgtgaataatgccagcaatatttgatggtatcttttttggtgtctttgccgcggttggtcagggaatcagcacccatatcaaccagcattttacctaacagttccggtgttccctggctgaccataagggtacgtgctgtatcggaaacatctgaatcccatgtaacaacggtaacgcctgcgtcccttgcctctgtcagtgcagaatccagtccggttgcgtcaacagatgaaatacagattgcatccacgccgctggccactgcgttgttgattacgttaacctggtctgcaaccgccgcattggcgctgccctgatagtcaacggtaaagccccagcctttggaatactcctgtgcgccgttgttggcggactcaaagaatgcgtttcctgtcagctttggaacaaaggcaactgtcatgccggcaacatctgcacctgctgcgggagctgccgcctctgtcttgccctcttctgccttgctctgtgcagcctctgcctttgcctctgttgcaggcgccgctgccgtagcagcagtaccgcctccgcagcctgccagtgaaactgtcattgctcctgcaagaaccactgataaccattttttcttcataacattgttcctccttaaattatttatgattgttttgttatcgcattttcagggaaattctgttcccgtaatacttctctaattcttcttcctgcggaacatggcgattaccttctggttattggccagggaacggccaaccaccaccaccaggagaatcagtccaaccgggatatccaggtactgctggtttaccttgaagcagagcgggagcccgaatcttaatactccaatcaccaccgctgccagggctgttccgggaacgcttcccttacccccggtgctcaaggttcctcccagcaccacggctgtgatgataggcatggtcagggtcgctccgatatcacttttggcagtgcccagataggaggtgaggacaatgccggccaccgccgcactcatggccgacagcacataggtgctcatgatcaccagcctgctgttgatgccggaatactctgccgcattctggtttacaccaatcaggaaaatctgtcgtccgtatttcgtcctatgcaaaaggatgtaggcaatgactgccagcaccaggaaaatcagcacctggctgggtatgaccccaaacagtttgaacttggtaatcctgataaagctgtcggggaatccgttgatacccttatagctttcagtagccgacaggttggataccagcagcgcaatgcctgaaaacaggaagcttccgcccagcgtgaccaccatgggctgtacgccgcagtacgccacaaaatatccggacagggcaccgcacagcgctgcaactacaattcccagtactgccgctgcccagatattgagcccccagtcctgccaggatacgccgagaacaatggaggtcagtcctacaatggaaccggcctggatatcaattcctcctgtaatcatgacaaaggtaacaaacaaggaaatgatacagatggatatcatatcattgatgcttccgaacagtacacgtggcatcaggaatttattgttggctgctgcaaatattacaaactccaggaccagaatacagagcagaacggtctcccagctttttaatgcctttttcatcactgaacccctccttttttatcagcgcccgccactgtcctcgcagacagtatctggtgcctgttcttcaggatggccctgttctgtgtcactgtattgagcaccacaattgtaatgagaaggatgccagtgatggtattgtcatagtcagaagaaaatcccaggaatacaagaatcctgctgatagaggacataatgattgcgccgatggacgcgccgatcaggctgccctggcctcctgtcaggcttatacctccaagaacacatgccgcaatggctttcatctcgtagctgttgcctgcggtgggcgtgatgaagccgatacgcgacgtgtaaatcatgccggccgctgccgcaaagactccgcttaatatgtaagctgtaattttcgtctgggacgcagggataccaacaagggttgctcctgccgcgttatcgcctaccgcgataaaatacttgccctttttagtctgcgtcaggatcagatgtcccgcaatcaccgccagaattgccgctgcataaaacgtggtgagctgtcccgcaatcagggtattggacatccttgtgaacccggcgggaaggttttccacccatgctccctttgtaaatacgtaaatcaggccgcggacaacaccgttgacaccaagggtaaatataagggatgggatctgaagcaccgacactccgaatccgttgacaaatccgatgactgccccgatggccagcgctgccagaatggccacggcccagttggaaccgtcccgcagcagcgttgctcccactgcagccgacatgcccagagttgctcccaccgaaacatcgatttctccggtcagtatgacaaaggcgcttcccactgcaagcaaggtaaagaccacactgtcattgaagcagttcaggattgacgtaggctgccagaagcttggatttacacagcctacaacgaatatcaatgctgccagaaataaaaaactgctcatttcatgggttttcattatttttttcaatcgattcatgtctctccacctgctttcattattctgtcacaccaaaggctcctgccatcaggctggcctggctgatttccgacctggacagttcacctttgatccgcccggaaaacaccaccaccgcccggtccgaaagctccacgatttcttccatatcggaggagatgagcataatcgccacaccctgggccttcagtttatgaataatggaatacacatctccccgcgccgcagcgtcaataccgcgggtgggttcatccagaatcaccagcttgggattggttgagagcgaacgtccgataatgattttctgctggtttcctcccgaaaggcttcctgctgtctgatcctgccccgtaaccttgatgcggaagtcgtcaatgcagcgtccggcaacctccctttctgcttttttattcagaaagaatcctcccatcttcttgtctcttaatagggaagaggtggtgttggcagccacatcgctgattgcgaacagtccgttgagcctccggtcctcgggcacatagttgattcctgcctccagaacccgggcggtggaatgtcctgttatatcctttccatccagaatcgcttttccttttaaaaccttgtctcttccaaatatggttgtggcaagctccgtacgtccggcgccgacaaccccggccactcccagcacctcccccgggtacaccttgaggtttacatcctcaaatccgtatccggagtaatcctgaagttcaaacacaggtttcagtccttcataattaatggctttttcctccgccttcccatccttgatatccgcctcatccatattgggaggaaggagtccctttaccagcatttccctggtgaagtccgatacgcgtccttttaatgtgataattccgtccctcataatcgccacgtgggtggcaatctgaaatacctctgccagacggtgtgttatgtaaatgatgccgatgcctttctgtttcaggtcttctacgattttgaagagactctctacttcgtcaaatgtaagtgcactggtaggttcatccaggatcagtaccctggcatttctcaaaagtccgcgcagcagctctaccagctgctgttctgctatggaaaggctcatggcttttctgttcaggttcaggcgccatccgatgtcttccataatctgcagcagccgctttctcaagattcctgacttttccttaaatccaatgaggacattctcttccactgtcatgtttggaaagagcataggttcctggggtaccatatagacgcccttggacagcaccaccgaaggcttgaaggaattgatcttttcacctgcaatgaccagctctccttcatccggctggtaaatacccatgatgattttcatcagagtgctctttccagcaccgtttccgcctatcaaagccagcacctcgcccttgccaacatccagatcaattccttttaatactgcgttcaaaccaaatgtcttaaagacgccgcgggcagaaagcagcatttcattagaatcacatgtctctgcttgactcatgtttaccctccttagtgcatctgtttttgatatttttgtttattgctcaaacatttgtaacacttgtaagtatacgtgaacgagataagtttgtcaagagcttttaagcattttaaccgtttatccctctatttttttcatttattttagcataattaccctcattttttctattctatgccaatttcctccactatttattattgacattcatgtttagctctgatatactaatcacagagttaaacattttaccaaaatctaaacatttgtttcccgatacaaaaattggaggtgcgtacggtagatatgaattacgaagattccctgattgtcaaaacagcttggtactattatatagaaaacatgacacagcagaaaatttccgaaaagctgggcatatcccgcatgaaagtcatcaaactattggataaggcgaaacagaccggggtgattcaatttaaaatctcgccggagcggagccagcagctgatgattgagcagaagctgaccacccaatggaatttaaaggacatctttgtggttcccacgccgccaagcggttccaatctgaatgaaaccattgctcaggcagccgctatgtatataggtgaccgtctgacagaaaacatgtttatcaacatgggctacggagacacccccagccgggtgttaaaccacctggccacgattgcagagacacccatttccgtggtatccctcacaggaggagtcagctattatctgcccaatatccgttccaacatttttaatgccaagctctatctctatccggcgccgcttctcgtctcttccaaggagatgtgcaaagccatgcgcaacgagcctcccattgaagagattgcaagaatggtccgtctggcaaccatgacagtggtcggcatcggagccatgaacgatgaggccactatcatttccaacggtattttaaaccagaatgatttcctgtatctttccatgcagggggcagtgggcgacatcctgacccacttcattgataaagacggaaagccgattcacagcgacgtggaagagcgtcttttcagcacgcctctggagacattaaaaagtctgaataatgttatagggatttcgggcggccctcagaaggtggaggctatccgcgcagcgttaaggggcggatatctggatgtgctgattacggatgaagaaacagccatgcagctgattgatttaagctgacaaagattatgtaaaggaggagtttacatatgtcaaagaatcattttcttacagtcgatgccggaacgggaagcgttcgggccgtcctgtttgacttggagggcaaccagaccgcatgcgtacagcaggaatgggatcacaaggaagatcccagatacccgggcagtatggattttaactgggaatataactggaagctgacctgcggatgcatcaagggcgtgttggagcagtccggcatttccccggatgacattgccgcgatttccaccacctgcatgagggagggtattgtactctacgacaaggacgaacacgaaatctgggcctgcgccaatgtggacgcaagaagcacggacgaggtcagccagcttagaaaggcataccccggactggaacaggaattatacctggaatccggccagacctatgccctggacgcacttccccgcctgttatgggtcaggaataaaatgccggacgtctacgaaaagattgcatatgtgggaatgtttaacgactggctgatccataagatgaccgggattctggccgtggagccgagcaacggctccaccactggactattcagcctcaaaaacagatcctgggattcctccattgccagacgctgcggactgcgcaccgacatgttccctgaagtaagggaatgcggctccagagccggaaccgtgaccgcacagtgcgaggaacagacaggactggcccagggaacgcctgtgattgtaggcggcggcgacgcgcagctgggctgtatcggagtaggtgttgtgaggccgaaccaggcggctgtgttcggcggaagcttctggcagtatgaatacaatacagcggacggcagaacagacgaggaatgcagagtccgggtcaactgccacgcggtgccgaatgtatggcagtacgaagccctggcattcaagcccggcctcgtgatgcgctggttccgggacggcttctgccaggcggaaaaagagattgcaaagctgaagggcacggacccctatgatgtgatgaacgagtacgcgaaggacattgccgcaggttcctacggtatgatgtgtgttttctccgatgttatgaacttcatcaactggaaacacgcctcacctacctttaccaacttcgagctggatccggtgcggttttcaaaatataccttctaccgcgcaatcctggaaaatacagccatggtaaccaagggccatctggacctggtgcgcgaggcaaccgggaaccagcccgaggatatcattttcgccggaggcgcttccaagagcccgctgtggtgccagattttatccgatgttctgggacttccggtaaaggttccggctgtcaaagaagcaaccgccctgggcgccgcgattctggcaggctgcggggtcggcatctataaagatatgtcagaagcagcagaaaaactggtaaaatgggataccacctatgttccggattccgccaatcatcagctctactgtgaaatgtacgaacaatggcgcagcgtttacaaggcttcgctgaatctgtgcagccagaatctgacgaggagcatgtgggctgccccgggattataaaacaggaggaatagcagaaaatgtttattgtaaatgaaaatgaaaaagagtaccgttttggggacagcggccccaagtacctgatgaaaggccccagaatgaattttgccgtggtccagttccagtcaggccaggatttcaaggcccattaccacaatatcatggaggaagatttctttatactcgagggcgaaatcaatatcgtggtggacggaaccgtacaccacttaaaacagggcgacctgatccacatcgaaccgctggaagtccactactgcttcaacccatatgagcggaccgtgaaaatgatttccactctggctccgttccaggagacggataaggtggagatagaggattataaattttatgaaaagagtgtcagtcggcaagcgtaatatgacagcaaaagagggactatcggtgacgatggtccctcttttgcgttgagcggtaaaaggcaaaatccacagggctgccttataaataccttcttaatgtacttcaaactttttttataattttattagcactcacctcttgacagtgctaacaatcgtgttataatacaaacataaagtaaataaaaacaaacagttctatgagcgaggaggatataacgatgatgttaataccaagaagaaactacggacttaatttatttgatgactttttcaatgacccattctttaccagcgcctccgaaaagggcgaggacgccaagaagcttccggtgatgcgcaccgacatcatggagaaggatggaaactatattttagagattgaacttccaggatttaagaaggaagatatccgggcagagcttaaggacggatatctgaccgtcagcgcggatataaccaaatccagcgaggacaaggatgacaagggtaccctgattcacaaggaacgctataccagttcatgtaagagaaccttctttgtaggcgagcagattcgccaggaagatatcaaggctggttttgaaaatggcatactgaggcttcaggtgccaaaggatgcgccgaaggtggaggagacaccgaagtatattgatattctgtaatcatcattgagtgcccacactccttttatatatattaaccctgataaaggacacagccggtaatcgcccccacccccatcccggctgtgtccttttcggcttttttatattctttatttcatcctatgctttccacaaaagccgatcctccttgatggtggccagtaccctgatattccgtatctcatctgtccctgtttccagtggattctgttccagcaccacaaaatccgccttttttccgggtgtgacagttcccttctcattttcttcaaaatactggtatgccccgttgaccgtcactgccttaagcgcatcccagaccggaatgcgttcctctggtcccagcacctttccctccctggtacgccggtttacggcgcaccacagggtctccatcatgtccggcatgataaccgggctgtcctggtgcagggtgaaacaaatgccctcctttagggccgaagcagccggactgatgcgtcctgcccgctccaaaccaaaattgcgcacgtggatatctccccagtggtatacatgggccaggaaaaaggagggaatgacacccagtttttttacccgctccagctgatcaagccccaaaagctgggcatggatcatgaccggccggatatcgcccctgtaaaaaccgggctttctgctgtgcccgctccccagctccctgtagactgtttccaactggtccatatactgctctgccgccatatcaccgttgcaatgggccagaagctgcatgtcttccagctctgccttcaaaacattttcctttacctgactgtcctccagggtattatagccccggtaattctcttttgtttcataggtctccgggcacgtatctccctgtcccttttcccgcacatccggcgtttccggcagatagggtgtccgcatccatgccgtccttccctggggtgagccgtccaggaacattttatacccgcctatcttcatatgccccttatagttctttatatggctttcaaatgtattccgggcagcatcactgtcccggatatccatataggagattaaatccagctttaaaagtcctgatttcagcagcatctggtacagcggaaccagccggcctgccatcaatccctcctggaccgtggtgattccataggaagcatagagctcctgggcgcggccataggcagtcagaaagtcctccgccgacggcatggggacgcgtccctggaagcctaagaatgcattttcctccatatatccggtcggcagcccgccttccatttctatgacgccgccctgaggcgcctgtgtctgtccggttacacccagcaggttgagggccatggtgttaaacacccccatatgacctgactggtgtttcagtattaatggattctgaggcgatgcctggtccaggaccttcctgcggggatggctgtgctccttcaggcggttatggtcatagccggatgccgtgacccattttccttccggaatcttcttgtccgcaatgtattgccggatgcatgtcagaatgtcctcaaagctgcgcgccccgctcaggtccgcttccattgtatggctggcacaggcagtaaaatggctgtgggaatctatgaagcccggcagcatcacccttccctgcaaatccagcctgcgggtcttatcccccgccctttcctttatcttttcccatgtccctgtctccaggattcttccgtcttccgtcagcacggcttccacccgggggcatctgtcctccattgtaagaatggtgccgttatagtaaagcgtctgcgccatgtcccgtcctcctgttctatgaattgactttccctgtttttcttagtatagtacctatatcataatacgctgtactgaaagtatgcacataaaaggagtttcttatgatacgcacttgtataacatggattaaaaagcgccctgtcctctcactctttttcctgatacttatgtatctggtaattggggccgcggcgcctttctgtcactataagccgatctcccaggaaacagaagaaacggtatcggctgagagcttctatcaggagggagacagttcggaccgcgccatgatactggaaaccaatcagagcgcctgggatgaacggatgcgcctgatgaacctggccagggaacggattatactgtccacctttgatttcagggacggcgatagccccagggacctgatggcagtcatgcttcacaaggccgaccagggagtcagcataaagatactggtggacgggttctccggcctggtgcgcatggaaccctgcaagcttttctatgccctgtccagccatccaaacattgaaatcaagatttacaacaaaatgaatcccctgcttccgtggaaaacccagggaaggatgcatgacaagtacgtgattgtggatgactacggatatatacttggaggccggaatacctttgattatttcatcggttcctatcccacggattccagaagccatgatcgggaggtcctggtctacaatacagcccacggcacagacaaggggcgggacagctccctgtatcaggtggaagattattttgagcaggtatggaatctggatgtgtccaccctgttccacgacagccaaacgacagcagacaggacctctgtccggaatgccgcggccatgctgagggagcgctataaggttctggccatgaaatatccggaactgctggacagtgagaaggattccgccggctgcgggacccttcccggccagcccggctgtccggctctgcccatggattccagtatcaacgatgacgtttccccggccttccctctgacccccattcagtcgaaggccctggagtattacggagccagcaccgttcccacgggaaaaatcaccctggtgtccaatcccaccggtatctacggaaaggagccggtggtctttcacaccatgtccgttcttatgaagaacgctaaaaagagtgtgctgattcacactccctatgcggtgttcaatgactatatgtacgataccatgaaggaaatcacgtcccgggtgccggtgaccatgatggttaactccgttgaaaacggcgacaatttctttgcctccagcgattatcccatgcacagggacgcattttgggataccggcatggggattctggaatatgacggcggcctctcctaccatggcaaatcccttgtcatagatagtgagctgtgcgccgtggggtcctacaacttcgatttgcgcagcacctatctggacacagagcttatgctggtcatccagagccgggagctgacagcccggctggaagaatacatggtctcctatcagaaggactgccgccgtctgctgccgggcggagcatatgaaataccggaacatctgaccattgcagatgttccggcgtataaaagggcggcctggaaggtggtgggctttgtgatgcagcccttccgtttccttatataacttttttgtccctccattttcctgcgaggtaacggctgaaggatatggcataattggcaatccagcccatgggcaccgcgtaccacacggctgccacgccccatatgggtgcgaaatgaaaggccgcatacacacgtatggtcagattcaccagattggcgatggtaaataccagcacatccccggagccccgcagaactccatccgtacacgccttcataccgatgaatacaaagaagtaggcgataaaggacaggtatcccgtgcccgccccataggcttcccggctcatgccgtctcccaggaaggaggttatgatagggccgttaagcagcgccactatcacggctatgatgacggagaaaccggccacaatgccgtagctggccctgtatccctccttcacccgttccatctttccggcgccgatgttctgggccgtgaaggtggccacggcgttgcccgttgcaatcatgggcaccacgcagatggactcaatcctgcttcccgctgagtaacctgccaaggcagcggaaccaaacccattaaccacggactggaccagcagcattccgatggatacaatggactgctggagaatggacggcaccgcgattctggtccctgcttttaacatgctgctgtcgtagagccggaaaccatccccgtcctcctgttcatatcccttacattttttcatcaggataccgaaggatatcagggcggatattccctgggccatgacagtcgctatggcaacaccgtccactcccatccccagccatgtgacagatataatatccagaaccacgttcaggacagaagaaaatatgagaaggtacagaggtgtccttgaatcccccatggcgttaaatatgccggcaaggacattgtacatgaacaggaacggcattcccaaaaagtaaatacccaggtaaagctttgcctggcccatgatattggccggcgtcttaagagattccagtataaggccgttcaggtaaaaacccgcgctccccagcagaatgctcacaaaaaggaaggtaatcagggccgtggaaatggatgttttcatctttccgtgctgcctggctcccagatactgggaggtcaaaaccgatgcgccgtttcctccccctatggctatcatgataaacacattggtcagtgcataggaagcgcccacagccgccaatgcgtcctcgcccacaaaatttcccacaatcatggagtccgccatattgtaaaactgctggaacaggtttcccagtatcatgggaagggcaaacaggagaaggcgccgccccggtctcccttccgtcaagtcaatccgcttctttatctgtttttcctgttcacggctttttgctgcactctgattcatcttcttccctcaatcattcatttgtatggatacacgtcttaaattcttcaagcagctccccaaagaaaccaagggcttcgtccaccggccgggtggtggacatatccacgccgcagagcttcagaagatcgatgggcttcatggaacagcctccgcttaagaacttcttatacccttccagcgcgcctggctccccgctcataatgcggctgctgatagccacggctgccgaaaatcccgtggcatactgatatacataaaaaggtgtgtagaaatgtggaattctctcccattcataatcaatctgacggtccactgtcatggccggcccaaaataatccgtattcagctggcggtacgcattgcacagactctcagccgtcaggctctccccactggccgcccttttatgggccatatcctcaaactccgcaaacatggtctgacggaacagggttccccggaagctttccaggaaatgattgagcaggtatgccttttcctccctgctgcctgccttcttgagaagatggcgtatcagaagcgcctcattgcaggtagaagccacctctgccacgaatatcttatacccggcataggtaaatggctggtttttgtcggaataccaggtatggatggagtgccccatttcatgggccagggtaaacacatcgttgagggtgccatggaaattcagcagcacatagggatggctgccataggttccccaggaataagcgccgctgcgcttgccttcattttcatagacatcaatccaccggttgtcaaatccctgccttaacaaggacagatactcctctcccagcggttccagcccctccagaacaatggccttggcctcctcataggtgtaatggcggtcagccgctgccaccatgggtacatagaggtcatacatgtgaagctcatccacccccagcacatcccccctcacccgggtatactcatgaagctttgtgatattctcccgcaccgccttcaccagattgtcatagaccagctccggcacctcgttgtcagccaggtagtattcccggctggaggcatacttcttcgcctttgcgtagaacacggcctgcttcacattggaggaaaatgcagctgccagtgtattggaaaactgttcatatacactgtataacccctcaaacgcatccttacgtatcctgcggtcctggttctccatcagggaaatgtaattgccgtgggtaatctggatgccctccccattctcccccgtgataacaggaaatttcacatccgcattgttgaacatggtaaaaatttggctggcgccctgcgtggcgtcataggattgggccagaagttcttccatctcagcggacagggtatgatcccgcctggcgagaatgatttccagcgcccgcttaaaatgactgattccgttatccgtttccatgtaccggtccagaagctcccggtccatggacagaatttccggcaccaggaaggagctgttctcagccgccctgtaggacagcgtctggaccctggaaaacatatcctggtatctctgcaccgtggtatcctcgtcggaacgcatcctggcatagacatacaggcgctctatcttctgggaaagcctgtcgtcgaaagaaaggcaggcataaagggtatccgcgctgtcagccagccgccccttgtaggaagcatattcgtttatttccccggaggcctctttaaacatctgttcccacagaccgtcctccgccaccatatcctccagtttccaggtatcctttacatctgcttcgcttcgttttttcatgcagaacacactccttccaatactatattaaattggcgccctattaaattcacctatatcaaattcgctgccagaggcaccacaataacggtcatcagtcccgccaccgcaatggagagactgctcatggcgccctcgatttcccccatctccagcgccttggctgtccccaccgcatgggcgctggttcccatggcaaggccctttgccacgggatgacggacttttaaaagctttaacacagtctcccctgccatattgcctaacacccccgtaagtatgatgctcatgaccgtcagtgtgacgattcctcccgcctcctggctgatacccattccgatggccgtggtaatggacttgggaagcagtgtcacgtagtggacatgggtcatgcccagcaccttacacatgagaaaaatgctcaccgcgctggtgattacccccgacgtaatacccaccgccacggcgtcggcatgtttcttcagcagatgcagctgcttatacaatgggattgccagacagaccgtggccggcgtgagaagccagctgagataagacgcacctttattatatgtttcataatccattcctactcccagaatgcaggcaataatcagggccgccgacacaagaagcggattcaggatagccagttttgttttattcttaagccagcaggcaaacaggtaggcgcctatgctgagcacaagaccgaaatattgcgtctgttccagtatcaatcgtattccttccctcatgtcactgctcctccccgctgtgtttcctgcccatgacccactgggccatgcatccggtcaccgccatgaccagaagggtggatatgcctatgatgatcagaaagggcaccagaactgcccttacctccccgatgcactccacaattccaaccgttgccggtatgaacatcatggtcatggtatccatgagaaaattgcccgatccctccacgctctccagcttcacggacccgcacataagggctgccagcatgataaacaggccgtatacaccggccggcacaggcaggggcaccatatgattcaatacctctcccgccagggtaatgcccatgataattcctatctgctttacatatctcatatcttttgtttcctcctgctgcgttagagcgtgttttcagccatgctctgattatgtttaaaattcgcacggcctttattctaccactgcatttttccataatcaacccgaagacagataaatacacaagaaatacaatcttaccgttgcaatggagaccttcctgccctacaatataggaaagtccaaaggcaggagtccaggaggccgcgcccgcatgaacatgacgcatatgaacaccacacatacaaacattactcatacaaacattactcatacaacaacattatcccggaaagaacaggaagatatacacaggattactgccctgtgccgcctcgcggacggcctgagtctttcctgccccggggacggggatgaatactggattctggaggaggatacgactgcggctgcttttctggccgtgtataaaacagaggtaaccatgtgggaatgctgtgccttcacacacccggattttagaagaaaaggatatttttccctgctcctggaacaggtctgccgctacagcgaagccctgggagagccggaactctgctttgtaaccgataacaaatgcccggcggccatggccgttctccgggaactggaggcagagctttggaatgaagaatatatgatggaatatgatgtaccggcagccggaaccgcttatgagagcggaacatccgtctcccaggcctccctgccggacacggaaccggacacggaactggacatggacatccatacaactccggaaggattgcttatctgcgcccgaatacccggggacaactcccccgcggatgggaatggcgttacctccccagatacaaattccggcacggacaacgtgccgggcgcctgcgtcgcctgccgtctctccctaaacggcaccagcgcctatctgtacagcctggagactgtcccggccctgcgccgccgggggctggccggccgtttccttgcgcagcttatccggcatctggagcgtaagggtatccggcggatctgcctccaggtttccggctccaatgaacctgccctgcggctctatcgaaaaacagggttccgcatcacggaaaccctgtcctactacctctactaaagcctgtttgaaacggctgttttacagcccttgtcagtccctgcgcaccgtgacgccctgggcttcgattttcttgcgtatctccagcatcttcatgtctgtgccggcgatgacttccgcacactgcttcagttcctcgctgatttctccgttatcgtcaataaaggatttcttatacttcagctgatggtccaggctggcccaaaagtccatggcaatggtacgtatctgtacctccacacggattggcttcttgctgtcagagaaaaacaccggtatctcgataatcatgtggtagctccggtatccgttgggcttgggattctgtatataatccttcaccgcaatcacctttacatcatcctgccttatcagcatatccgcaacttcatagatatcatccaggaaggaacagataatcctgattccggccacatcatccagatttttctccatggactccaatgagatctcaaaacccctgcgctgcagcttttcaacgatgctcttgggcttctttacacgggactttatcatctcgatgggattgcgctggttcttgacggacagctcgtcgttcagcacttccagctttgtcttaacctccctgattgcacaggtatacctcatcatagcctgctggaactggtgagcctggtcaacccacatctccggcacctggaccatatccggtacattgacgatggactgatgaagctcactgttgggattgatgttaatgttcatcggttcacctcattatctatggtttactgctgccgcagttttttataatgcctccactgcctttacagcctcatcaaaccacggcatttcaagatattccacgcgtcctgcatccaccatctgggcaatggcagggtcaattggtatctgagccaggaccttgatgccgtgctctgccgcgatttcctctacatggccttctccgaatacgctgatgcgcttgccgcagtcgggacattccagatagctcatgttctccaccacacccacaatgggtatatccatcttcttggccatattcactgccttggccacaatcattcccaccagttcctggggcgaggtgacgatgatgatgccgtccacgggcagggactggaatacggtcagaggcacatcgcctgtgcctggcggcatatccacgaacatataatccacatcctgccataaggtctcagaccagaactgtttcaccgctcccgcaatcacggggcctctccagataacagggtccgtatccttatccagaagcaggttggcggacatgatttccacgccttccatggacttggccggaagcatcaggctgccgtcaggtgaggttgccacgccctcattgccgattccaaaggccatgggaatggacggacctgtgatgtcagcgtccaggacagctgtcttcttgcccctacggttcatgctcactgccagcatggaggtgaccagggacttgcccacccctcccttgccgctgacaacaccaattactctctttacggagctggccggattcagtgcctccaggaactcacttttatctaccttgcggctgtcgcagtttgcactgcaggagccgcaattatggttacattcgctcattttttgttctccttccaatatttctaaacataattttaattataaagccatttccccatattgtccattgttttctggctgttcaccatcctgtcctctgacgtcactgttcaccgcggccagcagacgcctgagtgcaaatccgggacgtttgaccatggctttctccagtacagccttgttggaatccgagtgttccacctccctggaaaaccggtgggcggcatccacgaaatccatgaaggaaagccggccgccccggtctgtccacagggcctgggccagctcctcaatcaacagggtggccgcggcagccatcttcatttttccacagggattttcgttgtaaacagctccgcagaaataggtgaacacaaaatacaccataagctgctccttaagcaccggcaggcgttttccaatctcaccttccaggaaagcccggcgccgcttctcatatacattcctgccctgcccgtaaagagccgacctcatttccgaggcaaacgccggccaatccttccccagaacctccatttcggaaaacagggaaaacgcctcctccataacctcatacctggaacataaagcccggccaactaagacagagcgttatttccctgcatccctcaaactcctctatgtgcctgggatatgcgcggcaggtgcggcacaggtactccggccctgcctcgctgtagaggtcgcatagattttcctcatttaaaaacgcgcaccttccatggtactgtttaaaggagccttccttccagtgaatggaattatggaggcggctgccaaagggtccctccatgtccctgtacttcttaagggaagctctgtcaatcatgatgccccaccccgcgcagcaggtgtccgggcattccgacgcaatgcatttaaaacgattgtaatagtggggaactgtatatatcatatatgcctccttataaatgccggagctttcccccgcagggcagcgcttcatagatggtgcatcccatctgttcctcaaaataatcctttatctccagcacctttttccaacggggaatggtgcagggatgaactcccatgccgtgttaactgaactccgtttattgtactaccaaatcatacagatatctaccttgtatttaagattttacatgggaatcccttacagcgggccgcggcatagcccggacaacaatgtcccgccgcagcaaatgctctggcggcgggacacgatatcaatattccgggtggcctcctgttccttcaggcaggcttcgtagtcaatgagctccggcgccctctttaagcagtcctttggcctgggattgccgcggggcttgtggaaaatggaatcgcagctgtccgggtccaccatgttcttcatctgcagatccgccatatccatgcgaaggaaatcggcaatcttctgcatctgtctctgccatccgaaataaacccggggcgagccgtatcctctcatggctcccgtgttggtgtagactttaaaatccactgcctttaaggtcccgtccttcatgaaccctgttttcacatagtttacggaagcgtggcgcacacgggtggacaggatgctttcttttctgttgtactccgccttcacaggctttcccgtcatccgggagagcactgccgccgcgggctccaccgtcacctccagcttgtctccgaaggcgccgccgatggccggagccaccatccgtatcttgttataggacaggccgaagatacggaacatgataacgcggaaggcaaaggtgttctggcatgggctgtatacggtcagcgttcccttggaattaaagtcagctatggcaatatggggctcgatggacgcatggcggatggcctgggtggtgtagcggtcctcagatacgtaatcgcattcttgtgctcgatgaaacggaccgcgctgttgtaccgcacctggggtgtattcttataggcggctaccgccttcaccccgggcagagcctctgccgcggaggtgtcgatgctctttattccggcttgggaaaccgtgcttaagagcacctttgcgcaaagcattcctggcagttccatatcacctacatatatcttctgttccgtcacctttaaagcaacgtcgcctatggggctcggttttccgattacagtgtattcattctccattccggtttcctcccatccgactggcagccagtaaaatagccttcactatattgtcatacccggtgcagcggcacagattcgggtcaatggcctttctgacctcccgtgagcctgagtccgtccctcagcgtctttaacagcgtccaattctttcccactgccagttcccggcagaccccgttgatatacaggctaattgtttccatattgtatttcctttcagaacatcatttgacttgttgtttaaagaaccggtatgcattgtcaaagaaaatcttctgcacggccgtttccccgatgccgtgttccaacagataattcgcaaaccgtcccactccataaggcgtgctcaggtcggggtcgcaggtgatctcgccgtccatatccccgccccaggctatcacatcctctccgcctaactccagcatgtggtagatgtggcgcagcagatagtccttgcttccattgtcatcgtcgtctatgaaccgggagaacaggttcaggccgcacagtcctccccggcgcacaagttccttaaactgggcgtccgtaaggttcctgggatggctgcagcaggccctgacattggaatgggatgccacaaagggacgctctgctatgtttaacaaatcctcaaaccctgcatcgttgagatgggagcagtccacaatcatgcccacctgctccatgcgctttaccgcttcctttccaaaggcagtgagtccggtatcgttgttcggccctgaacccagctcattggccccgttccacaccagtcccagcatcttgaaattcaaatccgcaaaacggtttatgttgtctaagtctccgtttagcgcggctccgctttcaatagatcggataaaggcccattttccctcatccagtatccggtctaagtccgtgatcttctccaccagttcagcctggcccccggtctttctcacctggtcgtccatgtactggtggtaatccagtacgaactgcaccgcctccggcccgcggatatcatcaggcacgaaaacagccataacctggacagccttctgtaatttgtccctgtctctcagggagaactgggtggtgcagttaagataatcttctccccgtttttttaattcttctatggtgtcacagtgtaaatcaaacagcctcatagtatatattcctttctcaccgactttctcactggctttctaactggttttgcctatacaggctatattgacctctgccggctggatggagcactaagccctacggtcagctccagaatgccagcgccttctcaaactggtcctgaggggtggtcacatagcccacaggaaccttgcatccggcggcctcatacattttctttgccagttcctctccgaatgccccgcagacctcgatggccccaaagccttcctcccccagacgttttgccagcgccactgcctcatcgggattcctcaccgtgaggatatgtgtctcaacctgctccaggtccagacgcgccatgtccttttccgggtcatagcccgcgttcatgattaccatagcccacttcttcactgccatcatcagattcctcctcgctttgctctctgcgtaaccagatataccccggcaaacagggcaaagcgtgcgggtgtgaaccgtacacgcttaagccctgtctgccaggggactatccttttccagctgttattttaacagtgccttcatgactccgtaataggattccatgaccttgtttaactggtctatctcaatgtattcgttgatggtgtgggccagtgtctctaaggacgggcctacgcctacgcagcggattcccgcctcgcctgcatagtggctggcattggtgcagaaatcatagttggtgatggttgggttcaggccgatttccttcatttccttataaatgttctgtacccagtcctcgttcttgtcaaagagccatcccgggaagaaacgctccgcctcgatggtctcgccggtccagcacttctcctgtcccactgcgtaggaaacctttgcctttaactgcgggtcttcctttatcatgcggtcaaaaagctcctgtaagggagccagaacgctctcctttgtctcaccggtgagcagacgtctgtcataggttgcgcggcagtaatccggcacaacggatgcgcccggatatggggaggatttcacatccaccagctccagaatgccgtcgcccagcacatcgtggtgaggaggtgtcagcttgttgatttcctcaattactttgcacatcttgtagactgcgtttacacccttatgagggctggcggaatgggcgggaacgccgaaggtttcaaccacgatctccgcgcggcctctctggccaatcttcatattcagctgggacgcctcgccgatgataacataatccggcttcacataagcgctgatttcccttgcagccacgccctcgaagcactcctcatggacaacgcccgccacgtagatatcgcccgggaagccgtaattcgcatcctccgcatagtacagggctgcagccagcatggcggacagggcgcccttcatatcggaggttccccgcccgtacatcctgccgtccactatctcggcgccaaatgggtcatgctcccattttgtcttatccggtacgggtaccgtatccatatggccgtcaaagagaatctttggccctggtttggagccctttatgtggcagatgcagttgccgtatctgtccacgtggatatctgtaaatttgtgctcgtcgcagaatttcttcatgacgtccactaccaggttctcctgtccgctgtagctgggagcctgaatcatcttggttgtgagggccaggagttcctccgcccttttctcgtttaacattgacatttctttttcttcctttctacttaaccaattcgtaaaagtcctttgacttctgagctagggcaaggtccttttctgtctggggagccagctctgccgtgagggcgcctgtaggacatacgtccagacagagtccgcagcacctgcatttatccatatccaccgtcatttccgggaaggtgagctttctggcgtcatagcagcagactgtctcgcactttttgcagcccacgcatttctttgtggtgccgtcttccttaaatgctgtgaaatggaacttcaggccggaaatatgctcttcactggggaagtttggatgagctgccctgtttacctcccggatggagctgtatcccagctctgccaggcgctttgacaggtcatagcacatcttctccacatactccacgcccttaaggataccggccgtgcagacgcccacgcccatggctcccgccatcatgtactcgatggcgtcatccgccttcatgactccgccggatgcgtacaggttcataagctggggattttctttggctatctggtaattgtagcgcatggcaatgggtctcatggcagcgcctgtcatccagccaaagccgtctccgctcaacatctcaggcgcggccttctcaatgtcaatcttcagcgtggggccgatggaatcaatggcgcagattccgttggcgccgtgctccagacatttcctggctgttcccactgtgtcgggccagttgccggacagcttgcagataacgggaatgtccacatgctccttggtgtagtccagcatgggaatcagggtgtcctctgtataggataccagctcaatcatatgggctccggcacgttccacattctttacaatggcctgggcctcctttaaggtatggcccacggaaccaatgacaacggctcctgccgcgacggttttcggtatctcgttctcataccagttcaggcggtcggaatcagcccacttctcgcagttgatcagggaatcctggttcacggttcccatgtggtgtaccgggttgatggctgctcccaggcggatggtctttgtcaccacagctcccgcgccggcctcatggcccttaatcattccctccgccccgtagcataaggggcctgatgagagaatataggggctctgcagatggcatccgcagaagtctgcggagatatccgctccggttaattttgatttatctaacatattttacctccagcatttgtttacttcagtccgccttcccatacaatggtcttatagcggtccggatccgtgtctccctcggtggagaacataagtaccttggaatcctggttcagcccaagctccaaacgcagctcgcggtaggattcatccttcatgatggtggccagggcgccgaatgtggctgcgccggactcgccggaaacgacctgggggtctcccttaaacggagctgccagcatgcgcatgcctcttctggccacatcgtcgttcactgccaggaacgcggttacatggttctttaagatatcccaggaagtgatattgggttcgccgcagcacaggccagccatgatggtaggcatctcgccgtccacaatgcggatctccccgtctgctgcctcggctcccctgtaaaggcaggcggccggctctgcttccaccactaccatcaccggaggattcttcttatacttgttggcaaagtatcccaccacgcctcctgccaggcttcccacgccggcctggacaaacacatgggtggggcgctcctcaaactgctccactgcctcgtccgccatggtggagtagccctgcataatccaggacggaatctcatcgtagccttcccacgcggtatcctgaatgaccacgccgcgctccgcgtgtttggcctcctcggctaccatcctgacacagtcgtcatagttcaccttctcaatggtacactccgcgccctcgtcctcgatatggcggcgcctgttctcagtggagcccacaggcatgcggataacacatttctgacccaggcggttggcagcccaggcaacgcctctgccgtggttgccgtcggttgcagagaagaacgtggcctggccgaactcgtcgcgaagctccctggaggtgagcacgctgtaaggcatctggctgatgtcacgctttgtctcttttgcaatgtatctggcaatggcataggagccgcccaatactttgaatgcgtttaatccaaaccggtagctctcgtccttcacacaggcctttgccaggcccagatactccgccatgttcttaaggtctgccagaggggtcacctggtactggggaatgctttcatggaaagcccttgctttctttacctccaccacagacatgatggagagatttttgtcttccgtcttgggcatcttgtttaaagcccatttgatttcacagctcatgttccaatatctccttgattttatattgcgggcaaacgtcagacccattctgtcccttattgggggttacagcttctccatgcggagctttttaagctctcctgccgcctggtagatggcgtcggtcagctgctcataccctgtacagcggcacaggtttccggatatggcacggcggatttcctcccttgtggcatccggattctcgtctaagagagcctttgcgctcatgatgaatcccggtgtgcagaatccgcactggagagcgtggttctcaagaaccgcctcctggaccggatccagcttcccgttgcagcccactccctcaatggtgaccacgttccggccgtccacagagggagccggtaccagacaggatgtgactgccctgccgtccaaaatcacggtacaggcgccgcactcaccgattccgcagccttccttggtaccggtcaggcgcagttcgtccctcagcatatccaaaagcctctggtggggttttacctccacctggcatggctttccgtttaatgtaaaacttattttcatcttctccactgctatacctccattcccgctgcctgacacagggcccgaagtacgatttcctggaccgcaggctccttatactgggtagaccagcggatgccgatgcgctctatcatgacctctgaaacggtctttcccgctttggcaaacagctcctcagacggcttctgccctataaggaccagctctgccttctccactctgtcaggctgtacgaagatacatcccggagcgattctggcctctgtgacggttccctcagagtccatggtaagggctgcggcgcagttaagcctggatatggccagagcctttcttctgcccagcttggaaaatcccattccggttccctccggcagcttctttaccacgaattcacggatgaattctcccggttcaagcttgaggcttccctttccctcataaaaatccttgagcaggcatacccgctcgccgtcctggccgtacaccttgataagggcgtccgccgcaatcagggcaggcagtgggtcggaggccggaaacgcgttgccgatgcttccgcccagtgttccgcggtttcgtatctgcggggaacccacggtggcgctggcccatcccaggaaggggatgtgctttgcaatgatttccgactgctccagatccgtgtgggtggacagagggccgatgtatacatgcgcctcgtcctcgcagatatagcgcagctccctgtctaaataggtgatgtcaagcagacaccggaggtccttccaccgcttatccttttcgtgaatctggactaagatatccgtccccccggcgacgatacgggccttgccgccgtattccttaagcaccttcactgcgtcgtccagggaaacggccctgtgatacttatactgaatcatttgccgaatctcccttctactgtaatttatgtcccagcaatactgtctctaggtctgcaggattctcatagacccgtcggccggtggcgttaaagatggcattggcaatggctgcccccacgccctcggtggctggttccccgatggatttggctccataggttcctgccgggtcctggttttcatatatattgatgttcattttcggggcgtccatggaggtgggaaggatgtagctgtcaaaattcttcgtcttctgtccacgcttaccggttaccacgtcctctgtcaccgcaaagccctggcccattacaatgcctccgtaaatctgaccctttacaagagccggattgatggcggttcccacgtcgtggctggctgttacctccagcacatccacgtagccggtcttcatatccacttccacctcagccacgatgcagccgtatgcaaaggtggggaatgcttttccctgtcctgtctcgtggtcctgaatcaaatcctggggcttaaaccactcaaaggcagccatctgcttaccggtccagaggcaggcattgcagacgccggagaagggaaccttcacatccgggtatttctttaaatagaactggctgtctaaaagctccacctggtccgctgtcagcttaccgtaatccagggttcccttcttaaggccgtatgccttctcgatttcctccaggggaaggctgtgaagctccagggcattctggatcatgaccccttttaacttctctcctgtcttcctgacggactgcgctcccatgaccgttcctctggaggccactgtcatgccgcagtccggtatggaatgggtgtcggtgccgaagaagcggaccgcctcatagctcacacccagggcttccgccgcaatctgggcataggctgtctttaagccctggccgttctctaccagaccggaattaatcatcacggaaccgtcctcgttgcagatcatcatacatcctgacgcgtccggtgattcagctcccagtccggaacccctgtggcagacggccaggccgatgcccctgcgcttgcggcttccctcgggctgttttaagtaggctgcgtgtttctccttgtagccggtctgctctgcggtggcgtccatgatttcctggatcacgcagtgctccacgggaacgccggtggctgtcagagccccgtcgtggagcagattcttgcgccggaattccagttcatccatgccgcaggccatggccagctcctcgatgaactgctcctgcgcccaaatcagctgcggtgatgagtagcctctcatggcgccggagtgcacattgtttgtgaacacaccgtatgtatccgtctttatattatcaatctcataagggcctgctgagtggacattggccctccagttcatgaactgggtctggttgttgtaggctccgcagttatccacctgctcgccctgccaggccacgatccgtccgtcctttgtgagtccggccttgtagcggaggcggaagggatggcgcttagcggattccaggaaggagtcctccctgttaaacacgaatttcaccggttttttcgtcagattgcacaggtaggcgcatcttcctgccaccagtccggcgccctcctccttgcctccgaaggtgccgcccagggtctcctgcaccatgcggacctggttcatgggcactcccagcacatccgccacataccttcttgtaaagaagggattctgggaagcggaatgtacggtcatggcaccgtcgttggggttcagatagcagatacatgcctccggctcaatataggagtgctcgatgtactgggttctgtattccctttccagaacaatatcagccttttcaaatgctgcctccggatctccttttcggatatggaacatggattccttgaaaatattgtcgggatatttttcatggaccgcaaaggcgccctcgctcaaggcttcctcaatggtatacacgccaggaagctcctcatactcaacatgaatcgcctccagagcctcgtctgccagctcctttgactgggccgcaaccatggccacacagtctccggaataacggatggtatccgtcagatacatatatcctgcccagcttctggtgcggggcatgtcaaaacaggtaacaacagcctccacgcccggaatcccttttcctttcgcggcatcaacggacactaccctggcactggaataggggcttcttaaaacgccagcgtatagcattccttccatatatatgtccgctgcgtagcgcgcccttcccgttaccttatccaccccatcaatacggggtacgcagtggtttatcacagaaaaatgtttttcgcctacttttgttaacggcattctgaatctcctttccagaacctctctgtcttttcttccatctccctgcgcacagcctctttgtcaagggtcaccagctttccgtccctcttaagccatgcgcctcccaccattacgtttatcacattctgggggttggtaaaaagtactaattggtcatatacgttatattcattgacaggagtgggccttgccacatccacggtaatcaggtcggccagcatgccctcctttatgactcccgcctctatgcccacagcctttgcgcccagctccgttgccatgcggtacaccttccccgcaggcatggcctggggatccttatggcagcccttatgaatcaggaaagctccgcgcatcacttcaaagaagttattcacatagccgtccgtgcccaggccgacggtcatgccggcctccagcattttctctatgggagctattccgccgcccacctcgcagttggacagcggcatggagataccctttacgcctttttctgccagaatggctatttccttatcagtgatctgtaccagctgggaagccaggacgtttccgtccaggcatcccatgccgtcatatgcctccgccggcgtggttcccagatgttccctggcccatgccggttcaaggtcgctttcactcatatgcatgtgaagcaggcatccggcttcatccgccatgtgctttgcctcacgtatgaaatcctcgccgcaggtaaacagggtgtggatgctcatgacgcctttcaccaggcccttttcctcattgcaggcctttgcaaaatcgaagttttccttcagacccagccggccgttttccctgctctttctctcgcaggcctcaaaggacaggaagcccctcaggccggccttttctacttcctctttttctacttcaagagcgccgggaatggaattaggtccttccaggatatccacaaaggatgtaaccccggagtcaatcatctccacgcaggcccacctggcggtaatgcgcgccaggtcatggtccactctgtcctccacgcagggccaccagaaatccttcagataatcggaaaaatccgttaccattgcctctgccgtgatgccgtgggaaaggacgccgtacatatggttgtgtccattgacaaagcccggaagaagcatctgtcccggaaggcagactgcctgcgcctcctcattgcttccgccgcccagggaatcccagggccccacacaggcaatccgtccttcttctatccggacgccccagccctctttcaggccctccggcgtcaatacatagtctggttttataatggccgctgccagatttccattttttatcattctttactgcctctcatattttctataagtatcattccacttatgcccttctaagcggttggtgatattgcctctcacgcagagttcctccgctgccttctgggctgcccgaagctccgccttttcatcctccactgtaaggataactcccttttccatgactcccctgccgtccacatacacatctgtgatgttctttaatgacgcggagtaaaccagagtggagcatgggttgtgaaggggaactgccttgacgcactcatatgggtcaaagattaccatatccgccttcttgcctgcctctatggaaccaatctcatcctccatgccaatggcccttgcgccgtcgatggtggccatctccactaccttctcggccgacatggacagcggatccctggtggcgcatttctgcatcagggccgtgttcttcatcagctctatcatgtcgttggcgttgttggaagctgctccgtccacgcccagggaacaggtaacgcctgcctttaaaagctttggaataggagctgcgcctgatgacaggtacatgttggaacatacattgtgggagatcttaaggtcgtacttcccggccttctcaatatcctcatccgtcagatgtacacagtgcaccatcagtacgtttggcccgcagattcccatgtcaatcatggcgtctatatcccacttgccgtgaatgcccttggctgcctctctgtcaaactctgtctcggagatatgtacggtgaagcctgatttgtactcgtttgtcaccttccagagcatcttaagtgtctctctggtgttggaccacatggctgccggcgccacccagattttgatgcggccgttgtcgcagttgtggtagcgctcaaagatgtccctgacgcccttctcgatgtcgtccttctgctgcgtgatgcccggatgcacgccgtactggattccggtgtccatgcagcccctgccgaagatgccgcggattcccagctccctcatggcctttataacgccgtcgtccagcccttcccttggatggggatacatgtaatccaggttggtggtgataccgctgtggatgccttccatcaggcccagcatggcgccgtggtagcagtcatcgggagtcaggctggtggccgcggggaaggtcattgtttccagccagtcctttaacaccatatcatcccccagtccccgaagcagggtctggaacagatggttgtgggtgttcacaaagcccgggaacatcaccctgccctccaggttcgtcacgcgttcacaatccgtatacttggcctccagggcctcggtaggtcccacttccacaatccggtcgtcctttacggctgccgcaccgtgaaaaaatatctccctgtcaggatttaccgttacaatgattccgtttttaaataaatggctgatcatagtctaaactccttttctctttgattcacacgcgatagcttacgccgtctcaacttcatgtgcctttgcagatgcagcgccatcctcttctgtctggctgatttcccttatgtactctgcctccacttcctggtccgtcttatcctttggaagtatcaggttcaggacaatggcaaatccggccactaggatgatggatgactccccgaagaacatctgcacatattcacccataccagacagcgtatcctttgccagagagattcccagtcccagcgcaagggcaggtccgcatatgagcatggccctgttggtgaatctggctctcgccaccaggctcatgcctgacatacatatcatggagaataccacgatggttgccccgccgataacgcagttgggtatggtggaaagcacgctggccagcttcggacagaaggctgcggccgtcagtgtgatggcgccccagcccataacccagcggttacaaacctttgtcaacgccacgataccggagcactggctgtaggttcctgtggcgaaacagttgaagaaggaggaaaagatacaggcaatgccgttggcgatgatgccgcctctcagctcctcattcttcggctgcctgttaaggccgcctgtggccgaaaccgtaaagtctcccgacatctccaccgcattgatgaagaacagcaggacaaataccaaaacaaagttcaggtggaactccagttttccaaaagccattggcctcggaacagcaaaccatgccgcttcgctgatgggcgaaaaattgatgtatccgcagatagccgctatgacgtatcccacaatcatgccgcccagtacagctgccgcgctgaccatgcccttgccgtagccgttcataatcagaatagccagaatgacgaccaggccgatgacaaaattgtggagctgtcccatggacgggtcaccctgtcctcccgccagattataagcagcaatggggaaacaggagataccgatggaggtgataatggtccccgtcaccaccggcgggaaaaatctcctaattttgggaagagcaaagccgatagcgatagacaccagaccgcctaccaactgcgccccaaataaaacccctaacccataattgacagatacggaaatgcagatgggaagaaatgtgtatgtcagtcccatcatgacaggcagccctgatccgaactgaagattgccgaaccgtatggggaatacctgcagaagtgtggctacgccggctcccaggatggagcactgcagaagcagcgtagcgtgtgaagcgtccataccgcttgcatttgctaccagaatcatggggactatgtttcccacgaacatggccaagagctgctggaatcccagcggaaatgcctgcgcgaatggcgggcgtccatttaactcataaatggagccggttttgatagttgaagtacttttggatgcattcttattcatgttgttctcctttaactgattaagaatacgaaagggggcttcttcccttcgggtgttcctgacttcgtcgttacccaccctgattcgtaccaggatgtgcctgtggtatggttctttatccgtccagtgtacaggcttgacagatagactaaagccggagaaaagcctatctgaccaatgtgttcctgagtaaatagttgccggccggtatatctgtcttaaatgcgccgtcctctatgattttttgccctctcagaaatacatgccggactttatgtgaaactaccatgccctggtaagggttgtagtctacatactgcctctgtgtgccggcatctatgacatgactgctgtccggccggattaccaccagatcagcgtcgctgcctggctgtatcactcctttccttggatataagccaaatatttttgccggattttctgctgtcatcctggcaatgccgctgtatgtaaggccatggctttcagcctgtgaatacatgagctccagccggttctccacacccggaagtccgcctggtatgaggcggaagtccacccgtcccaaatccttctggcccttgtagttaaaggaacagtgatccgtggaaaccgtatccacaatcccctgcttcagtccccgccacagggcttcctggtctctgctgctcctcaggggcgggctgcacacatattttgccccctcgaaaccgggaagacggtacttttcctctgacaggaacaggtattggggacatgtctcgcagtaaaccctcactccctcttcctttgcttcctctatctccttaagcgcctgtctggtgctggtgtggactatgtaaaccggaaccgcgagaagccttgccatgtcaatcatcctggacacggcttcgtgttccacctcatttggcctggacagcggatggagggatatatccgccggatgtccggctgccagttcctcccggcgcacatccaggatatcgccgttttcacagtgtaccatcaaaaggacaccatgtttcttcatcagtgacaggagccggtacatatcccggtcctccactcccaggtcccccttataagccgtgtaggctttaaaggaagtgactccctggcgaatcatggagaggatttcctcctctatcccctggtcataccgggccacggtcatgtggaaggaatagtccgtaaaggaccgtccgtccgctttctcatgccaccggtccagaccgctttggaggctggccccctgctccggctccgaaaagtcaatcactgtggtggttcccccggccacagccgccctggtgccgctctcaaaatcatctgaagtcatgatgccgccgcagggcatgtcgaaatgggtatgggcatcgattcctcccggcgcaaccagacagccggatacatccattacctcttccccctcaaggggttccaggcccggaccggtctgtacaatccgtcccccgcctatgcggatatcctgccgcacacagcccgtcccgctgacaacggttccatttcttaacagcatccttctcacctctttgtcctgtgttttatttcaggcccatatttttcatgggtccccatcatgctttatccggctgaacagctttaaactcctgatttcaccgttattatcgttaatttttagacaaatatgaacaaaaaaaacaagagccgcaacgctttgtcaaaggttgccaaactcttgttaagattaacaaaaatttttctctcctgctggagctttttgattatgtctacattttacatcttaatctcaaaatgtcaatatactaccaaaagattttcgccaaacaaagtattttcatgtattatttacaattcttccattccctctttgtggtattttccgataaatcggttattcttgtccaaaaataacgacaattccaatttgtatatttttgagttggagggcaaaacccctgtccggaatggtacgggcaggggttggcttacagatattaaaaccgcactcaatcttctaacagatatttttctgtcgagcccaccttttcttttatgtaatcaatactcaattcatataccctattcttccattcaaccgaagtaaactgatgattggccccttttattatttccagacgggccttttccccatacaggtccagatatggtcccaccgcgtaaaccggaaccttctcatccaactccccatgtatgataagcacctctttgccgtaaccttccgcctgcctgacgatatctgtctttctcacttgtgaaaggaattcactggacatcataagtccgcctatgtcatagaactcctcgtagtggcccggaacagcatggacacggctgctgatatcatagtagaccacgtttcccggagcccacataacggctcccctgggctgaagctgcggtataatattggaaacaatggcccctcccatactgtgccctgcgggaaacatattgtccctgtcacaccatggctgctcactggcccacagataaatagcctttgggcaacaaacaggtttcctcccatgggaggcgtaagcattccgatgcacaggttaatcaccataataatgccgaaatgaagtggatcaaacccaattgctattgcaataggcgcaaagattggtccaaacagtacgattgacgatatggtatccagaaacatcccgatgatcaggagagcaatgttaagcatcagcatgatcatggctctggagcttgttatggacatcatccagtccgtaatcatggcagggacacggttcatggtcagtatccggccaaaggtatttgccgcgccaaacagtatcatgatggtggccgatgtgatggccgcgtcaaacatggcctcgcaaaaagccttccggctcaggtgatggtacacgaacacagccacaatgattgcatacacgacaccgatgacagcggattccgtcggagtaaacacaccggaataaatgcctcccaggattatgacgggcatcagtatagccggtatggcttccttcagcacaaccgctttttccctgccggtcttggcctttgtctcgttccccttatagccccgctttttactggcaaaatagttataaatcatcagggccacgcccatgaggacccctggaataattcccgcgataaacatataggatacggaaaccccaatggtaaccccatacataatcatgggtatggagggcggtataaccggcccgatggtgcttcctgccgctatcagagctccgctgtaccctttggaatagccctgggctgtcatggcgccaatcatgatgccccctatagccgcggctgtagcgggtccggagcccgatatggccgcaaagaacatggacgctactatggcagccatacccaatccgcccggcatggttcctgtcatcatttccgccacatccaccagcttctttgcaatgcctcccctctccatcagacttcccaccagcataaagaatggaattgccatgagagagaatgaatcaatgcttgtaaccgtggactgcgccagcatctgtgtcatattgcttcccgcgttaaagacagagaatgtagccacacagctcaatcccaaactcaccgcaatggggacagtgcccaaaaggcatacaaataatactcccagcattgtaccgatcatacctctgccccctccttacctgcattcatgaattctccggccctgcgctggataatccgtatactcataccggccatccccagcactcctgccagatacataatccatttgggaacgaagggcagggcggaaagaacctgcccctggttccgtatcaaattcataagccggaatatctcataagacatatatatcccataaccaacagcaatcacatcccccaccaggtacactgcctcaaaaatcttcgggtccttcttaaaagccaatgacaaggccgtcaccctcatatgggcattgatttttcctgcccagctgattccggcaaaggatgtccataccagcagcagcctggccaattgttcaccccaggaaagggtgaagctaaatacaaatctggtaacaacgttaagtgcaatgattatggtcatcacgagaaacatgcatacaatgatatacttctcaatttggttataaaaaggttctttcttctccgtcttctccatgctgttctccttatgtacaaggtctttttacttcatgtactttgcgttgatttcgtcaaccttgtttaccaaatcttcccctattccgggaacatacttgtcataaaccggctcagccgcgtcacggaacgcctgtctctcctcatccgtaagggtaatgattacatttgtcccattgtttccgatcttttcttccagttcagcctcattggaagcagagagttcacgctcataaacaatcatctcgtccacacattcctgaatcagctcctggtccgccgcactgaggctgtcctaccatgtcttggaggctaataatggacttgtatcataaatatggcctgtctctatgatatatttctgtacctcatacaatctgttgccgtcaatattggcaaaggggttctcctgggcatccatggttccattctgaagcgccgtatataattcagagaatgccatgggcactgcggatgcacccagcgcattgaaatggtcaatgtgcatctgattttccataaccctgattttcagtcccttcatgtcctccggcttatgaatttccttattggcagtcagctgtctccagccggtagccatccatgtcatccccttgaagccggcaggttccagattgctgaatatttcctgtcccacatcgccgtccagcacctcctcagccgcttcattggactggaataaatacggaaggtccaaaagagcagtggaatccgtaaatgccccaagaaatgccacggaggaaattgccatttccagagtacccatctgaagctgttccagaagttccgtattatttcccaatgctgaggcagggaacacgtctaccttaattcttccgccggttttctcttttaacatctctcccaatttgttggatgcaaggtcaatgggcactccctcctggctgacatgggctatcttgatcacgataggatctccctgggtgtggtccgcaaccccggcagatgactcagcgcctgccagctctgcctgctcctgcgtctcctccttttttgtttctgaaggctggacagcagacgaagaggcggcgctccctcctccacagccgctcaaagtgagcgctgccagtgaaactgcggatgcggttgccagtaacttttttcctgtctttttcattcttataatcctcccacatattgattgtatttatggactgtttcggtacttcctgtatgcattaagcatagcaatgccacaattgcaaaacaatatccgccgggactaataaaaagagacggttattatatcagctgcacatttctttatcatatgcagtcaaatatacccttcttttagccgtaaaatcccccctcctgtacatatttcggcaattctctatgtatatttcccaatttatctttttatttattgtatcaaaagcacatttttatatgatgtaaaacttgatatacttaaaataacaacagacaggagaggaatatttatgtatcttggagaactggaccttcatgaaggaatttgactactcatacggctgccccagagacgagttgtcaaggacgttttaatcaaattcacaaaaaattcataaaacagccacgctttttcgcctgtggcaagtttacttttgccccggaatgggatatactataaatgacctcaagttttctttagatttcaagaatagaaagggtgattttatgaatttggcaaaaatctctgcaaacggtcagattacggtgccggtggaaatacggcgtctgctcggcttaaagtccggggataaaattctgttcttccagaagcaggacggggaaattgttgtaagcaacgcttcttccaaagcaatccacaaggcgcaggctgcctttactggggctgccgaagaaatgggcgtttacagtgaagatgatattcaggcactggtagacgaagtacggtacggaaaggaaaggtaatatgcggatattggtcgacacaaatatcctgttctccgcattggtctttccacgttccaaaccggcgcgggcgcttctgtatatcgcggacaatcacgagattgtcctgtgtgaccgcaacattgtggagctgcgggatattctgcaacggaaagccccgaagttcctgccggacgcggaagtgctgcttgcggaaatgtcctatgagcttatcccagcggtagaccatgcggaaaagctgatacgcgacgcaaaagaccagccgatcttaaatgcggcgattgtgtctgatgtggatattattctcacgggagataaggattttttaagccttgaaatggaacatccgaaatgtatgacggttgcacaatttttcgagagtgagggcatggaagaataattctgatatggcggaaaacatggggcggaaactgaaaacaggttcctgccccatgcgtcatattacaagggtttttcagcccctaaagcgtgacacttatgcctctgtttccgtttgcgctctacggcgtgtttccgcttcatggcggcggcacattccgggcagtatttggcgcggttggagccgggaagaaataacttaccgcacacgcagcatttcttcctgtccagtcggtggaacagggtggcctccagctccctgtctagcggcagcaccgcaattcggaaccaccggcagagcagggagtaggaaatgctctggatgcagacacattcctccccgtcgtccagcgcgatacagttcccggaatcgtagttgcagcactcatgtactaatcgccgctcccgcctgtattgccggtagtccatgacaggaatggaatcatgccgcccgtttcccatagcgcaccttgcagcggcacacgggcggctgctctttggtaaagaccggctccggcctcctggctccggctggcgcgggcggcaagggcggctccgggatttgaataaaaattacttcgtctcctgccgtatcggtgtggggctcaccgtaacgaatatcgggcattactgcgacagctccatttctgcccaggctgttttccggtacgcgcagaaccggccggacatggaaaagcgaatctattatatagatgactttttggcagaacaccttgtatacgaaattccggaacactcttttgaacactttttcaaaaatgaattggactatatgaaaatctcccccacggcccaggagaccataggcgccctggttgcctgcaatatggatatttctatggctgccgaagctctgttcatacacagaaacaccatggtgttccggttgaaccagctgaaaaagcagctgaatctcaatccgttccacaaagacaacgacaggttcaaattgattcttctccatcattattttacaaaaaagtacggcggcaaccatccatcaggggagatgtcataattctgttttctccccaggcgcccacgccgccagctccttcaccagcatgatgcgcccaattataacgcacacagctcccgcggtattccacccgctgcttcccaatacaaccgagtattcatagaatgccgcggtctgcgtccatgctgttttgccggtccagattcgtggtaaaccaggactctcctcctgaaccgtcagagcatttccactgaatcaggtaaccttgaattcccttttcacctgttccgggttttggacctcaaagcctttcagacggcagtccttctgcacaagatagcgtgtcatggcggttccgtcggagctgaacgatcccccccgcagctgtaacatattccatgggtttatccagagtaaggatgatttgtcctatggacacgtcctcctctgatccgtctccgtatctgactttcatggtacccagggtggttcccccggctccaaagcttccggccggcagcatcatcaccactatttaaaaatacgattcatgggaggaaataaaattgaaacaggcattaatcatcggttccaccgtggtagacgtaactgtcaggctgccccgcctgcctgttaccggcgaggatgtgattgtggagagccagtctatgtccctgggaggatgtgcctatgtatgcggactggaactggatgaggatacaggaagcgtcatacgggacaacctggaagagtacccggaatatactgtttactttgcgccgggtcccagaatcagcttcatcccccaaggcagtctggagcgcatgttttccctatcccccattctgcacctcaatggggatgaggccatgggatatacgtgaatcacgggccccctggaagataagcagccgatgaacctctgccgaccgccttacagcccttacccgcaatcatgtcatcatcaccctgggtggtcatggcgcattccatatggagcctgggagacactgcttccgtcacctcttatgacttccgcagcaaattcacccggcgattacaccttccgggtgcggtccattgccaggtatggggacacagccccagggcgtcccggagagaatctgctttactccctggaacgccctgtgcattttgccgtccagataacacctcccgccgcgcctataaaagaacagagcaggcacactgacagcctgcccttcatctgcgccagccaccagacagctcctgcctcccccatgtccgccatatcggaacgcatttcccctatcttcctggcccagaattcaaaatcagaccatctgctgggaatcaaatccggaggtatcttaagctccagtttccatgccaggagtaatcccgccagagaaaatacggcagccaggatgaattcctttgtactcttctttatactcttctttatgccctcctttgtcctcccccttatccccctcctgcttcccggaaggccagagagcatccagactgaagttatccacagcggcagacacactccaaggccggcggcagaggaaaaatacgttccgtccaccaggaccttcccggacttaatcccattcctgtaaagaaaattttccgccgctgattttcctgtttccatcccatgggatgtcccttcttccgcaccactttctgccccccttacgtatgtaaacatcatgtatctcatggcgtctttctctttggcaggcagcagtatgacatgggatgattcatccgtgactccccgtatcctgtagggcttctgcctgcaccagatatattttcccgctacatccagacctccgaacagttccatggcaaggcctctgctgatgacgcatccgtcctggtctgaacggcagccatatgttcctcccagcagcctgggtgatgacgccatttccttaagtccgtatacagcgatgcaatccgcctcttctgaccttcccagtccggggttcaataccttcagcctttccgcacgggaccaggccgtgatttcaggcagcattttcctggtctgctcctgttcaccgtccagtgcatgggaaatcagctgttcctccaccgcctccccttccccatagtatataaatacctggctgcccgcatccctcatggtccaggccaggatggccccatagccccatacggcggcaataagtataagtatgatccattttttcattcttccaccaccctgacccggtctccttcactcactggtttgccggattctgtaatcagcttcatatcctttgtcacaagacctgacacagcagcggcggaactgctcttttccagtacctccacctggattctcactgcttttagctcctctcccagtatggttttttccggctctgccgccagacagtaatatcctttattatcctcacgcagcgcctccatgggaattacacaagggtatgccccggattccatgttcacggcaaaggataccaggtctcccagccttccctcgccttcctgcatcctggctgtcacctggattttcccgtcctctgccatctggtccacggattccacctctgcttccaccttctttgactgtcccgcaagcttcacctgcatcctgacaccctttttcaggagacctgccccggctgtctccttgtcaatctgtgctttcatctccaggccgcccacagccagcctgacctgatgaccgtcctggatccggtcccctgcctgtaatccggtatccaccacaaccccatccaccgatgccttgatttgtcctttggcatctattaattcctctatcttcctctgctttttttgaatctcctccatgtccagtttcatggactcctgtttcaggccggacattccccttccggccgcttcccctgccgctgtaccggcatccgatacccttgcgttttccaccttctccatggcctgatacaggctttcctccaaatcccggacctttcttccggcttgctccagcttgtcatcctctgccttcaaggcgtcctcatacgcccttcgcaggtcctcctggttttccctttccccgtaatccacatcctcgtagtcttcctcggccgcatacatctttgccctggcttcctctaccttcaggtcctcttcatcccggatgtcctccaaatcctctccggccctatcaaactccagcttagcccgttccagctcctcttcggaagccccctgctcctccaggcggtccagttttttctgcttatcctccacttcccgctccgcctttctcacagcagaatccctggacttctgggccgactcatatgatcttctggcacttttcatagccttgcggttatcctccttcacctgctccctggtccggttcttcttctgcacataatcgtgctccagttcaatggatgccttctcatggtcctccttcgccttcgccaaatcctggtttcccagttccagggctctctgggccgcggccagctgctgcagcgccagagtctcctcagtcacccgcgggaccggagcaaaggacatctgctcctgtttaaacgtcagctctgcctttttgtactccagggtcagggcatcccgctcctcctcaagtccttccatctgaagggtcaggaccgtgtctcctgccttaacagactgtccgggcctggctgtgatttcctccacctgcatgttctccggcagtgatatgtataccgttcttccggcagtaagctctccctctccctgtattgcgtagggtatcacatcctgctttccataccctgtcttcacccgtatgacggtaaatgaatccagggccctggacagaaaggtcagagctgccataagggccaggaatatggccgctgcttttttcacgttcattgactctcactccttgattcctgatgcggcaatcccctgctccagtgtctcctggcccatgatgaacagaaggacaggaagcatcatcatgatgaccgaggcagaccaggcagcgcctgccttatcagccgtaatgtccggcagataaagggacagcggccaaagtctctgctcctttaaaaatgtcatgggctgttcaatggcattccagtattccaggaatcccagcaccagcatggaaatgattcccggccgtcccactggtatacccaccttcaaaaatatagaaaagtcactggctccgtccagccttgccgcttctatgagaggcgttgggatggatgcaaagaattttgtcatgataaagaccggaaatgcggaaaagattcccggcagaatgaccgccagatgggtatttaaaagatggaactgcttaaggaccagataatttgggaccatggtcacctgaaaaggctgcatcatcagaatgatatagaaaagaaacaatgccctttttccgggaaaacggaagtgggcaaaggcccaggctcccggaagcgctataagcagctgccctgctaacaccagcccggtctgcaggcaggaattccagaacatcacataaaaccccggagaatccacaagcagctccacaaaggggcttagcgttggataggagggaataagggctgcctttatgggggcgtttcccatgccaaagacagcgccgaaacgttcaagcatctccccttcagacatcagcgcgttgcccgccatgagaaaaaggggaagccatataaaaaggcacagcaaaattaggactacatttgtcaaaatacgttttatcatctctttttcctcttccaggtccatagcagcaccggaatcaaaatggatgtctccaccatcacggatgccgcgctcatcttctgaatgtccagggatacaaaccaatggttgaacaggtgctggagcatgtagatactctcatggggataatcccctgatataaggtatgcctccctgaacaccttaaaggaattgacgacagacagcaccagcaccagaaaggccgtgctcttaagccccggcagagccacatggaaaaagctctgccaggaaccggctccgtccacctttgctgcctcgaaaagctcttttggtattccgtccagtccggccagccagagcatcatgtcgtagcctgtgtttttccatatataggtcagcaccaggatataaaaggcacttccctgattcagccagtcctgttccctcccgcctgcccataccgccagctggtcaaggagcccctgaggataaagcagcagcttccacagcagcacaacggaggccaccggtatggccatgggcagcaggagcgttgtcttatacaggttccggctgtccgcggccgctgtcacaagcaccgctgcccacagtgaaaaggccatcagcacagggatgcacaccaggataaaatgcagggtattcttcacagccagccggaatgcctggctgtgaaagacctgtatgaaattctccatgcccacaaactgcccgcccactgcctggaaaaaggagcggaccaccacattcacaaagggtatgagcacaaatatggctgtccccgccagacttggggccaggaacagccatggcctcatattcctgagctggatgccaaaccggttcccaaaatatttttttatgccttttctactctgaaaaatacagcattgccttgttctgcgcattctgagctgcctgttccagggacagtttcccctcaaaaaatccttttgtctcattgatgataatatccgtcaaaacccggtccatccgaatgggatgatccgccctggctgcggtatcaaataccagcaggcgttcttcctttgtgggccagctgcctgtcagctcgtaaccgtcagctccgctgacagcaatggatgtaccgcttgtattttcccgctccacccagtcacgggctgccagggcattgaccggaaggccgtctgaaaggtcctttgactggacatcacgtcccagcacaaagagaatgaattcccttgccatctccttgttccggcaggcctggttgattcccatggtacctgccggcaggtaggatgcatttacattttccatagtgaatccgtgctttctctgtactgccagaggcagcaggacatcgtacatgcctccaatcttgtcgattgcaatggcactcataccctggtccacacagttgtattcgcttgtcatcagtccatccgttcccggaataaggttgtagacattgccccgtccaccatcctcagactcgtcaaaggcaggcttggcaccgtttgcctcacccaggaccttcacggtctccaacagttccttaattttatccggatacggctttcccgtgcgcatatccacgatttcatcgtatttcagcatcagaatctgacgcagcagactctcataatttgtcttgggccgcaggggaagattggacgaatccttctggtaggctctcatggcttccatggacacaaggctggctacggcctggctgtccccataggcagccagcagcgtcatcctggtgggaatctggtaaatactcccgctttcctctgtataaggctttgacacctgctccatcagctctcccgaagctatcatgggacttaagtattccttcatgtcctcaagaatccccttttttatataggactccgccgggagaccgtccagaaccagcaggtccgccccatttccgcctaaaagctctgtattcagggcccttatggtgtcggataccgtggtgctgcctgccgaggtctggccgtcaatcaattccaccctgacatccgggtgttccagctggaacatggaagctgcctggcgaatggtatctgtctcttccagattcagcccgtatacagtcagggtctgggtgggcacggaaggcatctgcgggtcatatgtataatgtttcagttcttccttatcatcctgggtcatccagacataaaagtcattctggtttcccacaaacagcttcctgagattagcgcttggaaggctcagggaattaagggtgccgtcagccacggtctcccacaggcttcccccctgattcatatggtggattccccggggattggcaatgtatattcccccgcttccgtcagatgccatgggagcccacatgtcaaaatccggtgactggaatggtatctcctctttggcggacgctgacatgccggatatatcgtagctgatataggagctgtcgccgttcgtgatatatctgttccccatgagcaggcccgagcccttccattccatggaactccacttctggggcagggtaagaaccaggtcgccctcaggcgtgtacacgtccgtcaccccgctgtgggacaggaaaataagtccctcctccgacaccgccgcaaagtcaggcctcacatcgtaatattcccgttcatttttggcggaaaagacctggtccagaagcatcagaggctcctgcccctctgtcagtttcatcatgaatgtcttataatcatccccgctctggtacagcacataccggattccatcctccccccatatcatgtgcagggtcccgtaaggaaactccagtccctccagcaggctgttgtcctgtttctcccatttttcacccgtccatatgtatctggaagcttttttgtccttgatcgtatacagctccaggacctggtcctctgtctggatgatatcggcggctgtctccccttcttccaggggaatgcctatactgctctccgcgtatcttccccttgggccctcctgctgctgcttttcctcctgtctctttgattccgtctgctgttcacttgtgctgccgcctgctgtaccggacgggttagcgcatccccacaggcatcctgccagtatgctgacagccagacacaggctcataagtttctttttcattgtaattctcctcctggacaatattcatgtcccatgtatcatatcaaacaaatctctaaaaaaactgaaaaaatggaaaaatttcttttagattttttagagatttgtctgatataatggtatcatatattaatgacaatgaggatggaacaatgcggattttattggttgaagatgataaggaattatgtgacgccataaagctccagttagagcgggcgggatacgagactgactgctgcggccaggggcaggaagccttttattatgcggctgaatacccctacgatgtaatcatactggaccggatgcttccccaaatggacggactcagcgtcctgggcggcttaaggagaatgaatattgccacgccggtcatcatcaccactgccctggacggcatcaacgacaggattgacggcctggacgcgggcgccgacgattatctggtgaagccctatgccgcggaggaactgcttgccagaatccgggccctaaccaggcggccgggtaattttaagcagagtcccgcggccgcctgctccaacatcagcctggacccggagaaaagggagctcacaggtccccagggaaccctgcagctgagcaaacgtgaatccgccctgatggaatacctgattcgcaacgcaggccaggtccttcccagagggctgattctgtcttacatatggggtcccgactccgatgtggaggaggggaatctggacaactatatctattttctgaggcggcgcctcaaatccataggagccctgccccagattaagacggtccacggaatcggataccgcctggaaaacggagggacccatgattaaacggctccggcggcagctcaccgccctttttaccattaccaccggactgattctgaccctggtggttatcggcatcctggtcataagcgccagggaattcaacaaaaaaaacctggtttcctttcaaaaccaaatccttaacatcacctcccggctccagtccggcaccactatcagctgcacctggctgtccaggctggagagcgataaccgcctgattatacatatcgaggacaacggcaagcctctcctttaccgcggttcctggactccggccagcggtcgggacactttaatcatgctggccagggaagccgccatgtccgagcgcattgacccgtcatcaaggccggtatcctcatccctgctcaggagctctgtatttacggtgactggggactgcaatgacacctatctgggcagcgtgcttgtccttcccacacggacaggctttcagagcctgacactgcttgcctacaaggaccccatgggattcggcctgtaccggcagggtatcctgttctttcttctcaatctggccggcatcgccgcgctgatgtccgtcagctgggtattggtgggaaagtccttaaaaccattggcggaaagccagaaacaacagaatgaattcatagcggcagcatcccatgagctgagggctccccttgcggtcatccgctccagcatatgcgctgcacggacagcccctgaccaaagggagaaattcatggataatatggaccgggagtgttcccgcatgtcctgtctggtgggcgacatgctgcttctggcctcagccgacaccggacactggagcctcaggacctcctccctggacatggatacccttctaatcagtatctacgagcggtttgagccgctgtaccaggacaaaggagtctgcctgaagctggacctgcccgaaacctccctgcccagggtatgcggcgatgaaaaccgcctggaacagatttttgccgtcctcctggacaatgccctgcgctatacgccaagaggccgcagtgtcagtctggccgcatccgtacagacggataagcatctgctctcccgcggccggagcatggtctgcctcaccgtatcagaccagggctgcggcatggacgacgagacaaagaaacatatatttaaccggttctaccggggagacagcgccagaagccacaagcagaattacgggctggggctcagtattgcaaaggaactggtacagctccacagaggcaccataagcgtatcggattcaccggacggaggcgcctgtttcctggtccgcctgcctgccgaacctgagtctcatgcatccggcaggtaacggtccactgcctcggcacagccgtcgtggtcattgtcagccaccaccacatcgcacagttccttaatgtgcggcagggcattgattatggcaacggagagcccggcaatcagaagcacctgagtgtcattgtcggcatcacgatgacggttcccctaaatacaatgaacaggccacagaggaatttaccctggcctgttccggcagcacagccggtttttccctgaatgtcaacggggcagccatgctgagttctgatatgtcttcctatatggaagcaggtattttgagagggttccgcgtaaactgccggtgggcggacaacagcacagcggaatatggctttgtcatccgcactgacgcttcatccacagaaatccgtaaccaggcagactgacgccggatgcttccatgaggtctcctgtaaccatatccccatacatgccgtccctttcatcaatccacgcaatgcggcgttctccgctgaaattaaatagaccgatgagttttccgtccctgccgccctgccttaccatacccagaacagagttatcccaagtctccaatgtgcggaagggacacccggcatccaataagggttccccggcccgtatggcctccagctgttccagattatggaaaatacgattctggactgtttccggttcatttatccgttccgccagttcccactgaaaatctcccctgtgtatataccgggaatccggcgctttttcaggattgtccttataggtataatcattgacctgggccacctcgtccccgctgtacagcacagggatgcccgactgaaacagcatgaatgcgtggagcatggtatccagcctgacagcctcctccatggcctgcctgtcatggcagaatcccgccttttccacaccgcacatggaggccgtggttccgcagaaccgggcgtcgcctgtgaccgggtcgtcattgtacaggacgccccggctgaagctctccggtatcctgcctgtaaagaaatcattcagaaatttcttatggggaacctgtctcatcccccacttctccaaaagagggtaatccagtccccagcctatatcatcgtgacaccgcagataattgaggaaggtgcaggtggatggcagggaactgaccgtctccatctggctctttaagagtcttacatcctttgtggctgccgtattccagatggctgccatggtggtcacattgtatagcatatggcattccggcttttccacggttccaaaatagggtgccaccttctccggttccatgaccacttcccccagcagcaggataccgggacacacgatttctccaatcatgcgcatcatcctgacaatggtgtggaccctgggaagattgcggcagtccgtccccaattccttccatatgtagggaaccgcatcaatcctcagtacatccaccccgcggtttgccaggtagaggaaattgaacatcatctcattaaagacaacgggatttctgtaattcaggtcccattgatagggataaaaggtggtcatcacatgctgtcctgtttccggcagataggtgaagtttcccggcgccgtggtgggaaatacctgaggcactgtctcctcaaacatggagggaaccgtccagctgtcaaagaaaaagtatctgtcctggtattccttctcccctgcccttgcccttctcgcccactcatgctcctccgacgtatggttcatcacaaaatccaggcaaaggctgattcctctatcgtggcagtcacgggccagctgttccaggtcctccatggttcccaaatcctccctcacctttctgaagtcagatacggcatatccaccgtccgagcgtcccctgggggtatctaagagaggcataaggtggagataattcacatggcactgctcaatataatccagctttccttccacgcctttcaggctgcccgcgaaatgatccgcgtacatcatcatgcccagcatagagctctttctgtaccagcacgggtcctcttccctggaagcatccagagttctgagccgttctgtgcgctccacgtaaaacccctccattccctccaacagcccgtcaaacatatcctggctgttgtagagctccatatacagccacttcagttcatccatatgcttatccaggcgtcctttgtagattttatcgcgcttcatccctatcatatcctccttaaatgtacctgccacgcctggtattctcccttcatggacggtatgggcattccggccgacataaggcctgctcccggatatacggcccctgtatcctcatccctgtacatggcctccggctccagtccctccaggcggacatacaatgacagaggattgccgtgggtcttaaggatcaccgcatttaacagcgcctcccccttatcctcactcacaaagagccacgcggcggcttccctgtcctcaaagggattggtcagccggtaatacgccccgtcatgaatcagatgccagtatttatggtacgcgtctatctgttccctcacgcatttcttatcttcatttgatatggcgtttaaattcagctcatacccaaagcttcccgccatggcaaccactcccctggtcttcataggcgtgattctgcctgtctggtggtttggaaccgcggatacatgggaacccaccgcgctgatcggatagccaaaggaggtgccgtactgaatccggatgcggtccactgcgtcggtattgtcactgcaccagatttgcggcgtgtaatacagcatgcccgcgtcaaaacgcccgcctccgccgctgcacccctcaatcagaaggtccggatagcgcttcgtcaggcgctccaggaagtcatagagtcccagcatataacggtacaggacgctgcccggactgtctcctcccgccgttttgcctgccgccgaatatacgtccgctatgctgcggttcatgtcccatttcagatactcaatatgggcgctgtcaaggacctggcatatactgtcaaaaatgtaatccgccacctctttcctggaaaaatccagcaccagctgacttctgccccggaccggcttccttccgggcacggcaaaggcccagtccgggtgttccctgtaaagacagctgtcctcagataccatctccggctccacccagataccgaatttcattcccaggccgttaatccggctgaccaggctgaccagggaaccgcccagcttttttacgtttacctgccagtctcccagcccggaaaaatccgaatcccggtttccgaaccatccgtcgtccagcaccatcatttccacgcccaggtcctttgcctgccttgctatgtccagtatcttttctccggtaaaatcaaagtaggtggcttcccagttgttgatcagcaccggcctgggaatggtcttgtactttcccctgcaaaggctgcggcgcatggccttatggatgctgcgtgacaatgctcccagtccctgtccgctgtatcccatgattacctcaggtccgaagaaacgctcccccggcttaagctcataggaaaacatctcatcctgaagccccatagccatcctggtctgaccgtactggtccgtctccgcctctgccttaaagggtccgctgtacacaaaggacatgctgtaacagggcccggaggtttccgttgtctcccgtcctgccagtatcagaaatggattatactggtggctggaagtccctctgcggctccctatgacctgggcgccgtgacacagggcggtcctctggaaattgcgctccattgcatggcgtccgtaaaactgaatcaggtcgtattccccgtggaggaagtccagacatgcactgtatacccgtttcagggctgccggaccattccccccattttccacacagactgccctggtaataatgtcgtatccggggaatacgccgtagagcagagtaaccgccagcccgctgacctggtctgtcaggcgtatcttaaggctctctgcgtcctcctgcccctccccatacatggccggaaggccgggaaggctgtatttccctttgcatatttcgtacccggcatagcgcagattcagtccataggatcggccggcctgttccactgcaaaggcagggcttctgaagtcccccgacccctgatatggatattcctggggaagggcatccagggaataggtcctgtcatcaccggcctcatatgggttgggtgaaaaccccctgtcctcaaaggtaagcagatattccatggagccctctgtcctgtctccgtagtacagatgaagcagattcccataggaatctgccttcatctggtatgtggagtggtccgtgtgaagggtgaatatccttccattttcctgatactgtattgccatgtgtcatcctccgtctatatatatctgtctctatttccgtctctatttccattttctattttccgcctgtcattgcaatgccttcaataaactgcttctggaataccagatacagaatcaccatgggaaccatggccaggacagagcctgccatcagcaccggataattggtgataaactgtcctctcagggtggaaaggccggctgacagggtcatcatgttcaggtcggtgttggcaatcagaggccacatcaggtctgcatacgcgaacaccgcggtgaaaatggtaagggcagccatgctggccttggtcagaggcatcatgacctttgtaaaggtctgccacttggtacagccgtccaggtatgctgcctcccccagttcatccggaatgcccatgtaagcctgcctgaggaaaaaggtgccgaacgcgctgaccagtcctggaaataccagcgcaaacatgctgtttgtcagccccatcccggctaacatctggtactggggaataatgaatatctgggacggcagcatcatctgtacaatcaccagggagaacagaaggtttttccccttgaatttaagttttgcaaatgcgaacccggctgcagaggaaaacgctaccgcgcagagcacccgaaacaggatcagcagcgccgtattcacatacagtttcataatgggcagggaggcgatggctctcaggtagttctccttcatccactgctttggcaggatggtgggcggaatctgcacgctctcccctgctgatttgaagctggtgaacaccatccatataaacggaaatatcataagcagggctcccgctcccagggccgcatacacaagggcggtattaataccgcggtttgtctccagtgatttcataatttccctccatcctaaacttcatagttgacccacttcttctgtccccagaactgcaaggctgtcacggctcctatgagcagcacggtccacacgacaatggcggaggcgtacccgcggttccccgccacaaaggactcacggtagaagagatacatcagtgactgggcgcttgtaagggccggattcgtctggtccaccatcatgtaaatcaggtcgtacaccttaagagaagccatgagccgcatgattaacaccacaaacagggtgggcgataccattggaagcgtaatcttaaagaactgctctaccttggaagccccgtccaggctggcggcctcatagtagctctttgatatgttctgtattcccgacagcagcagaaccgcgtcatatcccaccgcgctccagactgccaccaccgcgcaggcggggagcaccagcttcggattggtcagccagttgaccctgcttccgatgacctggttgataatgccgtactctgcgttgaaaatccatttccacaccatggctatggctgcgggcgcaaccaccatgggaaggaaatagatggccctgaaagccgcctttgcccgaatcttggcattgagcagaacagcggtcagcagggaaaggaatattcccaggggcacggtcagaatacagaagtaaatggaattccaggtagccttccaaaactccttgcttccaaacaactgcacgtaattctccaccccgctgacctcatagtacccaaagggatgggtggtggaaaagctcagtaccagggtctgcaggaacggatatacgttcagcacaatcagacctattatcgtaggggcaataagcagatagccccattttgcatcctctgtcaaacattgtttcttacccatcattttcctccaatcctgccattattacagcgcctttgcctcgtccaccagtttctgcatgtcctccagtccctggtccagactcagctcgccgctgtatatctttaacagcaggtcattaatctgggttttccacttgggtctggatgcgttattgacgctctgcacgccatagagaaacatatccacgcatttctggacatccaatttgtagtcatattggtcaaaggcgcttatccacgtatcctccagacctttgtaggccggtatggcggcgcctgacagcccctggaccctctgtccttcctcagaacctgcaaatttcaggaaatcccttgcgtattccagcttctttcccttggctccggtggaatagcacaggccgttggatatggtggccctgccgtctccccggaccgggtccggacacttgggaagcacggccacgtcccattttccaatcatctccttgttattttccatgaaggagataaggttccagtttccttccaggtacatggctccctgctctgacataaacgcgttgcccggagctgtctcagcaaaatagttctggtcagggcaccacggctccttctggaggccgatgtaaaattccatggccttcctggtaccgtaatccaggaaccctgcctttgtcttatcctcgttcagtatgtatccccctgcctggtatacgaaattccagtatcccagctgatcatccgcatatgccatatatccgtattttccggttttttcatgaatccgggcagacgcagacttcaggtcatcccacgtccaggactcatcggggtaagccactcctgccgcgtcaaacatctctctgttatagaccaggcagatcgtatccttatctttgggaaccccatacatccttccgtcggaacccctggcatttgccagtgaaatatccgaaaaatgggtggtataatagtccggctccacatcgtcatataaatccgtcacatcctccagttttccataatccgcatatttgagaatctgattggtgtgcatccagaagatgtccggcagctgtcctgactctgccgccgcatccagcttggtccaatattcatcccagctggtgacctgaacctggatttccacctccgggttcttatccatataagccctggctaccgcttccatgccgcctctctgggcattgtcccaaatctggaagttcagatgcaccaagccgtccgaggctctggttccggagctgcatcctcccagcaaagctgcccccagcacggctgccgccgctgtgagcaatccctttttgaacgttttaagcataatataccccctgtcatccctgtttcttctattctaaaaccatccaatttgtcgccttcattccatccggatttccttgataactacatgatatcatgggttttaaagcaggtaaatattctgctttcgcaaaaaatatacccaaatactatttttatacctataacttgatataggctggcatttgggtatataatgattaaaaagggggttttcaggcaatgaacaatgtactgttttccatatttcccaacgaacgttttgtggatttgggtttatatcaatacggctgggaacaatgtgaaccgctgcactcctacggtccctacgccaggaaccactatctgttccactactgcatatccggcacaggcaccctcatatccacggattccaagggtgtgtcccacacctaccagattaaaaccggggaagggttcctgatttatcctaaacagatcaacacctactttgcggacaagaaccatccctgggagtacacctgggtggagtttgacggcctccgtgttaaggaagccctggagctggcaggactgaccatggatgcccctgtataccattccaatgcccgggacttaagcctggaactgaaaaatgaaatgctctacattgccaggcactccgaccagtcgcccttccacctgattggccatctttatctgctcctggactatctgacccgctcctccgcctcccgcagactgttaaaaacaggccgtctccaggacttttatatacgggaagccacctcctttatcgagcagaacttccagaacgacatatcggtggaggacatcgcggccttctgcaatctgaaccgcagctacttcggcaaaatcttccgcgacgcggtgggtaagagtcctcaggaattccttatcagctaccgcatgaccaaggcagccgaactgctgaaactcacggaactgtccataaacgacatcagcaatgcggtgggctatcccaaccagctccatttttcccgtgccttcaaaaaaacatacggcatcccgccacgccagtggcgccaggaaaacaagatggctccggtcacctagtactacagcgccggagccaatatcacttccaatatcacttacagatacttttcctcatattcctacacggatatgggcctgctgaacagatatccccgggctgtctccaccccgcaggtatgaagcacgttgagggggcgcgcagcgtaccccacatacgatccagacgctgtttctgctcccggtcggcatttccctgaagattgtgttaagtataacaccaaatttcattaaatccagtgggcttttactttttatcctaaatgttaccacaggggtgacttccctctgaaaatgttatataatattgggtatcaaagcattacggagaataaatatggatttaatcagccagttcatagagaattacaagaaaaagataaacttttatgagacagccggccggatggctgccaggcagctggaaagcgcccttcaggcagccggtatccgggccattgtgacctcccgcgccaaagccccggggcgtctgaaaagcaaggtcctcatacgcaattccaggcggtcggtcccctataaaaacatgcgtgagatatatgaagatattgcggacctgtgcggtgtcagggtgtcactgtacttccccggtgaccgcgataaggcggacagccttattaacgacctcttcctccttctggaaaccaaacagtttccggaacagtccaaggcgccttcttataacaagcgtttttccggttactgggccaaccattaccgggcccacatgagggaggagtcgctggaccgttcccagaaaaagtataccacggcccgcattgagatacaggtggcctcggtccttatgcacgcctggtccgaggtggagcacgacctggtctacaagcccctgcagggaacattgtccgacgaggagctggcgattctggacgagctgaacggcctggtccttgccggcgagattgccctggagcgtcttcagaacgcgggcaatgagcgcatacggaacaaaaacgcagagttcggatcccagtacgagctggcttcctacctgtataattatctcagcaacaacttccgccccgaggatatagagctgcgcatgggcaatattgagctgctgttcaaactcagcagccgcctgaagataaacagcgtaaaagagctggaaccggtactaaaatccgtgaaattcgagaaggaccggcgcaacatctcccagcagatcattgaccagatgattacgggaagtgaaaagcgctaccacatctaccaggagctgcgggccggtcaggacggcatcagcgaggacgagcgccatgcagtggaatacttcttcagccagtgggttcccctggaacagctgcttaaccgcgtctcctccaaaaactcccccaaggtgcggggagccttcaacatcaataccctgaagcggctgaatctgctggacagggaatgcatcaaccagattgtgtccctgcgcaagattcgcaatgtgctgattcacgatatcgagattccggaagcagattatatcaaccggcagggagacgaggcccagtccctgttccacaagctgtcggaacagtttgccgcccctgcttaagctaaaaggtttgcttaaaacggctgctgttgtctatgcctgtccccagaatctgcggatttcctcccggctcagccccagcgcaaactcctttttcagcaccaggaactgttccagttccagcagactcaagtataacaaggcccggctctcaaattcctgcctgtggacaggaagaggctgggccttcatttgtaatttcacctgctcaagctcatccagcaatcccagggcattgtttctttcgtgaaaggaaccgcttacggattcaagcagggacgccaccacagacgcctggtccggtttggactccattcgcgaaaaacagtcccgcattctgcacaggatggcaaactggtttttccgcagccccatgtagccaaggtaatagcgtgtgtccgccaaaagactgttctccatcccctcgtaggccctgcgctctccctgctccagggcctgttccagggcctgaaacccgtgtccgtccgtccgtgctccattctctcccggctccccaagctctgatgccatctggctcagcaggcagataaacttttcttcaatttccctctgggcagaacgtatggctgcccccgatcccggaatatacaggttgagtaaaactcccatacccgttcccacaaacagcagaagagcttcattggcaatgtccgccattcccatggaaccctcggccagaatatgggtcatcaggaccgtgttcacggatatcccctcctgtatgccccatttcatgcacagcggagtaaacataagaagaaaaatccccatagccaaaggccggtatcctgccaatgcaaaggataccggccccaggaccattgcggccaggaaagctaacagcctcccggccgtgacacgtaaggtttcccgcttcgtatcctggatgctgagcagggtaatcacgccggcggaggagctgtacctaaggcccagcgcctgggcggcagccatggccagcaggcttcccacggctatttttaagattttaagaaaacggccgtacctctgcatatacacctcccggtaactttctgactggcattgccttccattatctgtcatagccgtacagcaggcccgctgtcataaatatgccgctgagcgccccgcaaacctcacgcagccgccccataccgcctccaaaggaagaacttaaccgcagagcccccttttcatccatgccgtgcagatcgcagaacgctgtaaatacagactgggcacagttatatccgtccagaaacagccccatggcctttcccgcatggacgcttgattccacatcgattgtcataaactaacctcatccggaacaatcacttaaaattatactcggttacgattttctctcgtccggtggtcacatccgtaaaatattcatacagacagattcccagataagaacctgatatattccacacattcctgtagccccggttcacaagggccatacacgcattatagcttctctggctggaacggcagtggagatatacaggacgatccgccggtatctcatccagacggtcccgcagctctgacaacgggatattgacggatgtctttaagtggcccaggctgtactcattcctttcgcggacatcaatgatatacgcgcctgtctccaccagatcccgtacctttgtcacaggcacctgccttacccgtccatagagcaggttcagggccaccagggccgcctggttcaccacatccttggcagtaccgaatacaggagaatagcacagctccagctcctttaaatcctccagagttcctcccatggaaatcatggccgcaatgacatctatcctcttatccacattcccccgtccaatggcctgggctcccagaatccttcctgtgggatattcataaaccagtttaaagtgcatgggagcgcttcccggcatcagcccaaccttatccgttgggataatatagacggaatcatggggaataccggctgcaccggctgtcttttcgttcagcccggttgctgccgcgttcaggtcaaaaatacggaccgcgcaggaaccaataacccccttattattatggggaatgccgtacatatggtccgccgctgccctggcctgtctctgggccgggcctgccagcgccagcctggacggcttatgggtcagcctgttaaacacctctatggcgtctcccaccgcatagatgtcagggtcgcttgtcctgtaattgtggtccaccttaatggctcctgtctctcccagctccaggcccatggccttagccagtcctgtctcaggcgcagccccgatagccagcacggtcatgcctgccttgacttcctttcccgaagccagggtaatgctttcttccccgatggcgctgacaccgtcatttacgatcacatccactccatggtccagcagctccttctggagcatctgcaccatatcataatcaaagggcgccatgatctggtcctgggcctcaataacggatacatgccttccgtccatgctgagattctcagccacttcaatgccgatgaatccgcctcccaccacagccacatcctgaatctggcagtcggtaacaaactttttcagattcacaatatccgtcacattcctcacagtaaatacattgggcctgtccacgccctctatgctcctcgggcggatgggattcgcccccggagagaggaccagaatgtcatagtgctcctcatagacatccccggtgcatccgtttcttacccggatggttttcttctcccggtccactgacagcacctcgctgtccgttctcgcctcaatgtcatactgcttcctgaacttctccggactcatcatgaccagggcattgctgtccttcaccgtgccgctgagatagtaaggaagggcgcagttggaaaatgacacatgatgccctctctcaaacatgatgatttccgacctggcgtccagtctcctggccctggccgccacagacgcgccgcctgccacaccgcctacaattaatatcctcataatctctatttcctttcttccgctgataggattctctcaaaacattcatctgcaatgtccgcagccatgcaaatcatgtcgagacagcgggtatcttcttgtttataggtctttaccagctcacagcaggcatctgaaccaaaacgctccacgaattcctctgcaaacgcagccacggccggtttaagctcaggggttgcatgggccctttccttaatgagccggtagctgatggcggaacatcctccgcacaaggcgccgcaggccttcccgcagcccattccccctccgaatccgcccaccagttttaccgagtcgtccggtattcccagttgatattcgtcattcagggcacgcagcatggtttccgcacagttattatccttttcaatgaagtacccatatatcctgtcccttgtcatcttacctctcctgttctctcaaagtatcttttatccatattatagatattagcacgtcccaagctgacaatgcaagttttttgatggtttctgcaaaaaagcgctgaggattggggggtaaatgtgttttggggcatccgtccgtgagtggaacaggggtgggggaggcggtcgcgggctgcggagcgggaatcatcctccctgctcctccacatattccagaaaatcaaagtcagcataatgggcatgttttacacggtccgcacaggttatgcctgccatggttccggtgaactccccgtatttgcagtactcgtcggaaaaccgcgtggtatcaaagatgcacccgattttctcgtatttctctccgtcatagctccattcaaaccaggactgtctgccctgtacgtacagtctcaggtaaacaggccggtcctccaccggtatcctggtattgaggaattccgtccttactccattttccagatggatgacggataaggcgctctgccccagagtttcgctgtaatattttctcaggttaatgtaattcatgttgtcgtaatagagaatcagccccgcgctgtgctggtggacctggggcatgatacggggagaggatgagccgaaatctcccggccggtcaatgcatccttattaattccaatgtcatacactccaccaagtgtacccatcccaaccgggccattgtacagcctcctaaattgaccaactatcatctggcagaatcactatatcataattcctgtgaacgtgcaaggcaatgcacaataagcaccgacacagaaaaaaggagcctgacttccaggaccccgctgcatccagctgccatgcaatggggcctgaatcatcctgctccctgtttatattattcttccagattccggaataccgtcttaagcgcaggatacatctgcctgaacctgccgtactgcttttcatactttcccgccaggccagcatccggctcaatggtctctatgactttcacaatgctgtccgctgcggtcttcacgtccggatactccccgcagcccacggctgccagtatggcgcctcccagggcagggccttcctcgttttcaaccacatccaccttcacattcatgatgttggccaccatcttcttccacagagggctctttgctcccccgccgcagattttggtgcggtcaatgcggatgcctaaacttctggccacctccagggaatccctgagtccgaataccacgccttccaatacggcctgggtcatctcctccctgctggtatccatgctcatgccgatgaaacatgccctggcccttgggtcgttatgaggagagcgctctcccatgagatagggcagatagaacacatggttctctcccagcctgacgattccctcctgctccctggaaaactccttcgtcttaagaatttcctccatccaccacttgttgcaggaggctgcgcttagcatacatcccatgagatggaaatgtccgtccgcatggtcaaaggaatgaagtgcgttgttgcagtccaccttaaagctttcgctggaaataaagatggttccgctggttcccagggaaatattgcagcagccctccccaacggttccggtgcccacagcggcagccgcattgtctcctgcgccggcaatgatttttacatcctgtgtgaatcccagctcctttgccagttcctccttcagatttcccaccacctgatagctctcatacaaatccggaagctgttttctggtgatgccgcacatctccatcatttcctcagaccagcgcttgtgggccacgtccagaagcagcatgccggaggcatcggaatagtccgtgcagaagctgccagacagcctgtaagccagataatcctttggaagcattatcctgcatatgcgcgcgaagttttccggttcatttttcttcatccagagaatcttaggggccgtgaagccggtgaaggcaatgttggccgtgtaagcggacagcttatccttgccaatggtctggttcaggtaatctgtctccttttcggaccgtccgtcattccagaggatggccgggcggatgacctcatccgcctcatccagcgtcaccagaccgtgcatctgtcctccgaagctgatgcctgccacctgtgatttgtcacactccgaggtcagctccttcatgccgtccatggaggctgtaaaccagtcctccgggttctgctccgaccatccgggatgggggaaatacaggggatactcccgtgaaaccaccttgtggattcgtccgcttccatccattaataacaattttaccgctgaggttcccaggtccactcctatataaagcatatttttccctccccgcgtttttatgcaaatggattctctgtcctgtatcttacgctctttggctggttgtagccgatttcctccacatccacgccaatgtacttgaatacctcaaacaatgccttgccgtaatttccaaaggccacggctccgtgatgagggaagtttttctcaatgagtacgtggcggtagaaccgtcccatctccgggatggcgaacacgccgatggagccgaaggaacgtgtggcaaccggaagtacctctccctgcgcaatataagccctcagtttgttgtccgccgtactctggagacggtagaaggtaatgctgcctggtttaatgtcgccctccaatgttccctgggtcacttcgactggaagggccctggccataatcatctgatacttcatctcgcagaaggacagcttgccggacgcggtgttgccgcagtggaagcccataaatgtatccttaagagtataatcaaatttccccttgatatcagcttcatacatatccttcggcacggtgttgttgatgtccagaagagtaaccgtatcctggctgatgaccgtaccgatgtactcgctgagcgctccgtagatatcaacctcacaggacaccgggataccctgggctgtcagtcggctgttcacatagcatggcacaaaaccaaactgtgtctggaatgcgggccagcattttccggcaatggccacatatttgcggtagcccttgtgctcctgcacccaatcctttaaggtcagctcatactgggccagcttggagagaatctccggcttcttgttgcctgctcccagttcttcctccatctccttcacaatgcctggaatcctctcatcccccgcatgcttgttgaatgcctcgaacaaatccagctcggaattttcctcaatctccacgcccaggttgtacagctgcttgacaggcgcgttgcaggccaggaagttgagaggtcttggtccgaagctgatgatttttaactggcttaacgccgccaccgcgcgggcaatgggtacaaactcgtgaatcatgtccgcgcaatcctcagcatcccctgccggatactccgggatatatgccttgatgttacgcagcgccaggttatagctggcattgagcataccgcagtatgcgtcgccgcggccctggcacaggttatcccctgactcctcggctgctgccacgaacatcttaggtccgtcaaaatgctttgccagaagtgtctctgatatctcagggccaaagttgcccaggtatacgcacagggcgttgcagcctgccttctttatgtcctccaatgcctgaaccatatgtatctcgctctccacgatgcacacaggacattcataaatttccgccgcgtcatatttggccttgtaggcttccaccaatgcttttcttctgttgacagagagagactccgggaaacagtccctgctcactgccacgattccgatttttacctctggtgtattgttcattgtaatttcctcctcatacatgattaaatttatttgtccgcatctgagttttcatgttctgaatcagacgctcagattctctcctttaaggccgataaacgccccttccggcagtccgccctcggcatggcctatgagccacttgtttctggcaaacaaaagcctgtcctccgggtccttcacatccactggctccatgtccagattggtgccctttggaagaacgatgacacatctgaagccctcatccttcacatggcagggcgcatagtgcagggttgtggcatatacctccaccgcggttcccgcaggaaccagaaatgcctccatcctggatgtatcgtatgtatggtcttcctcaatatcctgctgttttcccaatatcagtatcaggtcgtccacagcaatgtctacctctgaatcccggtgatattccactgcattcagtttcttgttgtgtccgttgcagcatcctatctgaatcggcatctggccgtagatcccgcgttccagctcctttgcatcagacagggcctccatctcaggcagcgagggaatataaataacatcctccggcaggggcgtatgctccattgcctttaaaagaccgctgaaatcataacctgtgatgacccttccataggctttaaacgccggatccgccaccttcctgactgtcatccccatgttcatacctccttatatcggcccgtacgtttttccatccgcaccagcctgttttctctggtaaccattataatataaacaggaaaaaaaaacgtgctgttattttacgaactaacagcacttttttgcgatcttcactcatctgacgatgacttgcggatcatctgtttttgattcatctgcttccggtactggctgggcaggcagccataccgctttttgaatgccttggcaaatgcccttgcatcagcaaatccatgatccagagcaatgtcccccacataacggtccgaattcagcaattcccgcatggcatactttaccctcaaatccatcaggtatgtgcggtatcccacctgagcatattccctgaacatatgggagagataggagggtgtaaagccaaacctggacgcaaccatttccagactcagttccttgtcatagttctccttcatatattgtgtcacctgggacagcttatccaaatggcgtttttgctgtacctggaccttatcgatctgctcaatcctaaactctgtcacaatcagatagaggaactccatgaactggctctttaccttcaggcggtagccgaattccctttgctcatacgtccggtacatggcagtgaccagggacaccagcctggccttttgactttcttccctgtccgcaaaggtgatgcaggactcatcactcatatacccctcaaaggatttcattggaatctggagcacaatggtaatattggggtcagggcattcaatggaatggatttcattgggattcacaatgacaaaatcattgtgcttcaatgtatactgcctggaattgatgaagaaatccagcgttccctccaacacaagaaacagttccactgactggtgccaatgcttgctgacccggtaatttccatcccttccctcgaatatgaacatccgaaagggcagatcgtcattgggaattactgtctcgtatctgaaatccatcctgcacctccatttcctgcccgccatttgcgaattgcgatgtccggcaattaaatttatttcctgtcactcacacagacctgtttaacttaaaaatcaccatggtgactgccccttcctgtcccctggtaccgctgttaaaataaagggacagcgaagcgggctgaggcacccgtacaaactttgcatggtttgaaaagattacacgcatggcggcttccgctcagcagttaccggtccacacatatcttaaatactccctggcaatctgaaccagctctgctgcctttttggccagctcctcaggacttacgggcactgcacgggcaagagacacataagcatcctcttccatccgccgttttttacaggcttccttccggcagctttcatatgtttccaggaatctgcgcccatcgtcatccccggtcacccggaacgtgcaaatcccatagcccaccccaaagggtccctcataggtcagacgcctgggcatgactgcctttccatccatggctcccgccatcatggtaaagccgcggtggccgcattcccccgccttttcgcagaaactttctgaaaatgccagcagctccccaaactccgcctttcccataacgtccattatccgctcatcatactccggcccctggacgctgtagccataaggcccgtcccctctcagtttatgggacaaatccccgctggccacaatgaataccctgcgtcccagattttctgctgctatggcaatgtaccggcctgcccggtaatggtgggcaaaggacagtccggatccgccgattcgcaccagcttgtaatccctgtaatgctgatggataaaatgcagcgggaccagcgttccatggtccagctcttttttcctctctccctctgtacccatgggaaaatcatcctccccgcagagtccgtccagttcccttacgaaagcttcgtcatatacggcttcttcccctgcctgcggggccatgaactggccaaagtctcccctggctttctttcccggcgatacatggaaatagtccgcgtacatcaccgcatgcggcgaaatcaccacaatggtatccggcttcagctccgctgccatcccggctgcctcctggtatgctttaatggtatccttaatgagaatctcctgccctctgcccacctccggcacaatcagaggcggatggggcaccatgattcctccaatcacagccataatgcctatcctttccgtccggtacgttccgccggaccggtacaatccaccagcccggtacaatccgccagcccggtacaatccgccagcccggcgcaatccgtaacatgctctgacttaagtatagcatcggaaatccttttttaaaaggggataacccacaaagccagcacaagaagcactgccagattcgtccccacaatcagcgcactgtaatccccggaaaatccggacagcaaaagggcggctggcacattgctgataacctggctggctcccacgcaggtgatgatttcccggccctccagaatccggcccaggaaccggcagaaggcaggcactcttcccatattgccgatgaatacaaaaaacgcgcagaatgtcaggagaagggaataatccacagccagaaacaggcccctgttccccgccgtttttctccttttccggcatcctgttcctcacggccgctacggccaggcagatccccagcattcctaaggataccgctgtgtagggcgccatcagctccataaaccggcccgcgcttaaaccggcttttgaatacagataaagattctggggattgccaatgggcgtcagcatacttcccagatttgccgcaatggtctggagcaccagcacggcagacacagcccccggacccttcacataccccagaagccgctcccctgcttttttgaacactcccaggctttgaagccctgccatcacggtcatcaggcaaaacagaaggccgattgtcttataatcaatataagacgcatattccctgtccgtccgtttccgttcttttatacacatgaaatcccatgtgttcgtaaaatccccttgcctggggattctgctcattgactcccatttcccttaatgcctggggaatatactgtttgatgtcctctatttctgcctgtgataactcatactctgtcctcttcccctgtttaatccggcataccctaacatatttcattttcgcaaatgtccaagtaaatataatggtaacaggggacaaaagcttatcccttccccgcctgttcgcgctcctgtccgtttacttcccggccaaaaccggcaaagtggtaccgccgtagggcatcacaatcgtccctgccctctgccccatctcctttacagccgcgtcgcaagaaagtgccttcggcacctcaactcccctagcccctcattcatgaggggaattagggcttgttttttgcgtcattttattccataataatctcatgaatgtgattcagaagatgctcagagactattacgaaatcattgaatacgatataaaacccagacctgtcgtcatggaaaacattgataaggtcattaactgcggggatccttcttatggtggcgccatgtatggctgtccccattgcggtaacctcaagttcgttcctttccgctgccactccaagttttgcccctcctgcggcgctaagtattccaatgacaggtctaccgctatgtcttttaaattaatacagtgtacccatcgccatctcgtcttcaccattgacgaatccctccgccgctttttcctcgaagaccgcactctgcttaactgccttttcgaggctgtttctgatgtcatcaaagaatattttttctccctgaacaaatccaaaaactttgtccctgggtttatctgtgtccttcataccttcggtcgccctcccggttggaatccacacatccactgtctccttaccgaaggcgggttttctgatgatggtgtctggcgcaaggtcacatatttcaattattcctacctccgtaaatcctttcagactgttttgttaaataaactggaaaaacgcatcggtccctcttttaaaaagatgaaagccgccgtttaccatagggacagaaatggattctacgtttatgccaagcccaatctttgcgacccaaaatccattattaaatatgtcagccgttatcttggccgccctgtcattgctctttccaggattgattcctacgatggggagatggtgactttccattacaataagcatgaagacaactcttttgtaaaaaagactcttcccgccattgatttcattaagctgctcattctgcatatacctgaaaaaaacttcaagatgacccggtactatgggctttatgccagacaccgggagattgacaatcagctccataaagcagtcccaaaatccaaacacaggattctcctcgatttcaacacctggcgtaagcttttccttcttaccatggggtacgaccccctgcaatgcccaaactgcagacatgaaatggtctttctagagctgtaccataaacatgaacgggttcctctggatgaattatacaaaaggacaaggataaggcatggcctttatccccggtcccgctctgcttgactttctctcccatctgcttcatactacatttattacagatgggaggcagttgcaaatgaatcaaagatatgtggatgaactcagacaaaaatacatcaaaaatcctccagaaggaatgacacccaaactggtcagaaatatgaccgattctgatttattggatatgcattactttttaactgaagatgacgacctcgacgatgatggatgggaagaagggttctatatcgacctgttctaaatcaccgtctgttttctataccctcctttggcagaatcattagtttacataactttatttcagcaaggactttggtaagtaggtaagccccttacagggcttacccctctcagaaccggacatgcagctttcccgcatccggctccctgcaaagctaatacatctacagttatccgtatatactgacataaatacgtggccgcacaagcgggaactgtctcattagttccttatatccttccttcgtatagctccttctctgacttcttctgttcagccagtagaataacctaaaccataccacattattgaatgagttcaggcttcttgaattgtcagtaattccgtaataatgataataaccagtcagtacttcatttagtttctttactatcctgtttatctccagaaacctcatgtctcttatcatggcgtttatttccctgcttttctttgcaagctttttcttactggttttcctctttactctgaactttcccgtcctgccatgcgaacagtaatgcgtgaatcccaggaatgtgaacgtctccggcctcccttttccccggtctttccggttactttctgcgaatcggccaaattcaatcaaccttgtcttgctttcctccaattctagtccaaagtacttcattctgcgctttaagtgttcataaaatatttctgcatctgatttatattggaagcatcccacaaaatcatccgcatagactaccagccccgcatatcctctcatcactggctgtactttctccctgaaccaccatatcagcacatagtgcatatatatattggctatgaccggggagcagtccgagccttggcctgccccttcttctgtctcctcatatctgaaatctctcatgattcccgctttcagcatccgtcttaccagtctgataatggtcgggtcttttatccgcgattctatgaactttactatccattcatggtctaaatggtcgaaaaaccctttaatgtctgcgtccagcacccaattcgtcttttccctttccagcatcccattcagtctccttaatgccatgtggcagttccttcctgggcggaatcccatcatttcttcgtagaaatggggctcgaacactgcttccagtattcgccttagcgcttcctgtactaacttatcctcatagcaggatatactgagcgggcgggtctttccattttcttttggtatttccacccgttttgccggtttgggcttgtatgccttcttcttcattttcctgattaattcatctaagttttcttccaaatttacttcgtagtcctctttggtaattccatcaattcctaccgctttctttccatccatctccttgtggcattctttcagtaactctttattaatcagatgccctatggacgtaaataccatttccggatgttcgcttgacaactgtgatattctcgccaatttcgtttccataatttctcctgtctctgcgtacagattatgtttcctctttgatatgactttgcatggctgacctgcgaggacaggtctctctcgacttccaccgcttttttttgctgtgtactattcggccatccgacttctgccggccatttacggttctcctttctaccgttgttccgtataccgggcttacgcaacctgcccggagcctggcagacctccccagttgacttaaaatccttgattacatgaccagccttaaaaccccggggaagcagctgcattctcgctcttaacgactacagctgtgttgctttcagtgtataggagcacttctgccttcccaatttcattttaatatcgaagctatatacggctatgccctgcaatcccgctgtctacgcttagcaggcaacatcgctgctgtccacccaagactcgcttgatgcggtatagcttgtaccttacaccgtgggactctcacccactaaatttcaagcccttagctgggcgcaccctataatacaaaaaagaaccctctttggaaggattcctttctctaaaatgcgggagatgggacttgaacccacacgagcatacacccacaagatccttagtcttgcctgtctgccaattccagcactcccgcaacacgaatggtagtatagcatagatttttcaacttggcaaccatttttgacaaatttttttaatttttttcgtaaaccaaattctataaaaaatttgaaaaacaatattgacaaatcgctgttactcatttataataaccttcgttgcttgagcagagcagcagcacaaaacaaaatgcagaagtggcggaattggcagacgcgcacggttcaggtccgtgtggtagtaataccttgtgggttcgactcccatcttctgcaggcagaaagcaggaatttccatgatggagattcctgtttttcgtttatcccatttcccgcggcagaccggcccggcggcagacagaccggcccggcggcagacagaccggcccggcggcagacagaccggcgcctccaggcctccccgcctccgcctattccccatcctgttcaggaacatacgggcatgtggttctgcgcacaatcaatgtagggtcaagtatcacccgttccggcttttcccggggggttttcagctgctttaacatcagacgggcagcgtgctcgctcatctctctgacatgctggctcaccgttgtcaggccaatgtcatagagggacgaaaaaacaatattgtcgaaactcaccacggaaatccgttccggaatcttaacccccgactcccggcagcgctcaacaaacccaatggccatcatatcgttggaaaccacgattccctttggacggttcttcaaatccgatatataaatctttgccagttcgcttcccgtgtccagcttcaaatcacctttgaatacattttgttccttaaaagggagccggtaattctccagcgcctgtctgtatcccctgaaacgctgctccgacgccgacgagacatccggccccttcacaaaggctatctccggataccccagctcaattaggtgcatggtcgcaatgtaaccggccttaaaattgtccgacagcacggaatccccttcataggaccccaggatcctgtttaccagcacaaccggaatctcaatattctctaattcctcttcaatttcctctgattgggcagtaagcaaaaacacacctgaaaaattaaactggatagccatatgaatgaactctttttcccgtctgatatcatattcgctgttcaggaccatcagcatatatccattgttgtgaagaatcttctgaatgtagaaggtaagatccgcataaaacggattacggatgtcactgacaatcagcgcgatgatgctctgtctgcccttgctcagacttctggctattgtattaggctgataacctatctcctccacaaaatccagcacctttttgcgcagctcctccccgactcccggagaattattcatggctctggaaatagtggaacgcgatacccccagcatccgggccacgtcggaaatagtatacttatcttttttctggatactcattctcttacttccttatctgctttgaaataacatggctgtgatccacctatcccaataagcgtcttgctattattataatataagtaaaaatgtaatgcaatcggtattgcgagaatcgaaaaaggaggagcagccccagctgtcccccctttcgcccgtcatccttaattgaacggcgccggataaatggtatcgtgttttgcaatttcaaacggccatacagtaacaagcgaaccatcctggaactgagcgattgtcagcttgccgtccatgttggtattcttataaggaataccgttaaattcagactcggagaacttgatggtatcataaggaagaataatctcctcgcctcccgggaaggcttctttaatttccagagcgctcagctcatcctttaacgcttcagaggtaatctccccgcctgcatccgccaggttctgaagggctgtcctgaatatccacaccaccgtgtacgcctcagcggaatgcccgttcatatcaacaccgtactttgccttaaacgcatccgaaaccttggtccccttgtctccaggcaggaattccgtggctgtaaggattccgtttgcaagaccgcccacggacggcagataggaggattccgtataaccgtttgccttggctatcataatgttaggtttgtatccctgctcattcatggtctttgtaaggaggattgcatccgatacataattgtcaacaatgagagcgtccggattcagggactttaactgcagcacctcgctggtcaaatccgccgcgccctgggagtaaagaacctcgcccttaaactccagtccgttcttttccacaaagtattttgcccaggttgctgtctgctgtcccaattcggtgttgtccgcgcagaccgcaacactcttcacatcaatatcatccgcaggatccttggctgacaaatccagaagataccgctccatatcacgtataaacatcatattggtgggcgccaggcggaagaaatactcgtatccgtgagaagtaagggagtccgacgtggcattggctgttatcatcggcacctggtagttttccgccacctgggacactacctcggtaacgccgctctgatatgcgcccattaccgccatcaccttatcctgtgtaatcaaacgctccatctcagtcatgcccgtggcattggccccctgggtatcaccgtatacaatccggataggacggccgcttattccccctgccgcattgatttcctccacagccaggtcaatgccgtccttcatgttctggcccgaatcagccagcgctcccgtcatgggatacagcgcgccaatcagtatcggctccccgtcagccgcggactccttcgccggctgcgctgcgctgtcactgccagcggccgcggcctccgaagccgctcccccagccgtgcccgcgggctttgcagcctccctctgtcctcctgaaccagaaccatatcccccgcacccggacagcatacccgctgccacagcaacgcttaatgtcaatgccaccaattgtttcctcatgtatttctcctccttttatttgattaacccatataagggccatctttcattttcattccgcacacgctctaaaatccaagatacgcctttttcacctcatcgttgtccaaaagttcttccgctgtgccagatacggtaatctggccattttcaatcacatagcccctgttggcaatcctcagcgccttccttacatcctgttccaccagaataatggtaagcccggactcctgcgccacctctttcgcgatggagaatatgatgtccacaatgttgggggccagtcccagcgagggttcatccatgataagaagctttgggagccccatcatgcccctggaaaaggcaagcatctgctgttcgcctccgcttaaggtgcctgccagctggttctttctgtccttcagtttaggaaaccagttataaatccgctcaatggtatccttcttagccgccttcgccgccttgctgctggctcccatctccagattctcatagattgtcatggaaggaaacaactgcctgccctccggaaccaggataatcccgtggtcaataaaggttctgcaggccgcaccggtgagatcatgtccatccaaacagatatttccctgaaacggcctgagcagaccggcgcaggacttgactgccgtgctcttccccgctccgttgcttcccaccagggctacgatttcccctttatccgctgtaaattcaatatcccaaagcacctgaatgtccccataccggacattgattttatttaccttaaaatacctgtctgccatatcaatgctcctccttaccaagataaatctcgatgacataggggtcattcattaccatctccggagttccctccgttattttctcaccgtgatgcatcacaaccaccttctggcagagattggccacggctctcataacatgctcaatcagcagtatggtggttccgttctcattgattttgcgaatcagctccaccgcctcgtctgtttccgtgggattcaggccagccataacctcatccagaagcagcatatcagggtccgtggccagggctctggccagttccaggcgtttcttaaagggggtgcccatttctcccggcagccagtccttccgctcgtacaatccggtaaaatgcaggatttcctccgcgtattcctttgcctctttcactgatttatacttttttcttccatacaaagcgccagaggcaacgttatccaatacagacatggatgccagaggcttcatgatctggaatgtcctggcaattcccatggacgtgtagtggtatggcttcatgccggtaatttctttatttttatagataatatgaccggccgtaggcgggaacacgccgctgatcatattgaataccgttgtttttccggctccgttggaaccgatgagcccggtaatgccgccctcctccacagcaaagctgactccgtccacagccttcagtcctttgaaattcttactcaaatcctttatttccaatatattgcccacttaaaacgtctcctctcccggtttactttttaccgtcaagcctgtaaaacatctcatcgacctttaccttgaatttgctgccgttataccagcccataataccccttggccggaacaggataaccacaatcagaacgatggcgtaaaccagcagattggctccgggcgctatactgctcagggtagagttgagatactgagccagcggcgtaagaatgatagctccaatcaaggggcctgtcacacttccgatccctccgatgacagccggaagaacgaattccacggactgcgcctgaatcatgatatccggattaatgaaacggatataatttgcgtagaacactccgcatacagcaatcagtccgcagctgacaaaggtcgccagcaccttatatttgagtggattgattccgattgcgttggccgtgtcttcatcttccctcaccgtctttaaggcatatccaaacttagaacggtcaattgctcgcacaatcagatataccgctattaccataagaagtgacagataaaaatagggcaccttgctcttgaatctcagcagagccagggaattttcgccaaagggaagcagaagcccctgccccttgccggcaaaatcccagttggtcatcagattgcggaacgcctctccaaaagcaatggtaaccagcgaaaaatacggtcctcttaaaacaaaacaaggagacagcagcaatgcggttaacactcccacaaacagaaacaccagaggaatgctgatccatggcgacacattctgcttaaccagcaaaagggttgacatatatgcgcccagtcccataaaggaggcatggcccagggaaatctggcctgtaagtccgcccaggatactccaggccagagacgcgctggccatgtaaaatgtcatcacacaaatcgacagcaggtacggtatacggacaaatacgggtatcacagccgcgactagaagtaaaatcaataataaaatctgtctggaacctattcttttcttcattgctatctacccccgtcttgttttcactgtctgcttcactaccagaatcaatataaatgccaggaacacaatggtatccttaaaggaggaacccacaaccaccgctcccacggtttccataagtcccagcacaataccgctgacaaaggctccgattacgctccccagtccgcccatggtcactacaatgaaggaccttgtcccatatacggccccaaccgtaggaaatacataatagaaggacatcagacaggctccggtgattcccgcaatggcggctcccagaccgtatgtagtggcatagaccatctttgtcttgataccgcagacctgcgctccggtactgttctgggaagtggcgcgaatttgttttcctatattggtatactttaagaaagcaaacaacagaatagttaccgccagaagaatcacaaagctcagcacctttggaaggcttaagtttatagctcccagctgcacgattttctcggaaaacatactctgggccgttctgtaatccgacttgaaataaagaagcgctacattctggaacagaattccaagaccaaccgttaaaaacaacacattggtatcgtcatttccgtggagggaccgcgtaatcagcgtagactgcagaagcgccccaaacgcaaacattaccaccgccacaatgggaattgccacaaaggggtcaagtccgcattggtcaaacagaacaaaggatatgtacattcccagcatcagcagctcgccctggcaaaaattgataatcttcataactccgaaaatcagcgtcaggctcatacctatgagtgcataaattccgcccaccataatcccattggcagccgcctgcaaaaatatattcatgttactacctcccaactaatttgataacagctccgcgttcaccgacgcgtttccacctgtttctacctccccaaaaaacctccgtctaccgggataaccgcccccgatatataagcagaggcatcggaagccaaaaacacagccagccccttaagatcctccgcggtcccccatcttcccatgggtatcctgcgggtggtctcctcgtattgggcaggattcttcaccttcatggtgtccgtcagtgccgtggccatgtatcccggagcaatggcattgacattgattccttctgccgcccactcattggataacgcttttgtcagctgggcaactccgcctttgctggcactgtaggcaggaaccagaacactgccgaaaaaggaatccatggacgctatgttgataatctttccgtaatgacgggccgccatagacttcccaatcctctgagacatgaagaacacggcgttcaggttaagctcgattacttcattccagtcatccggcagcacctcaaaagcagcgcatctgttcaatgctccggccgcgttaaccaggatatcaacacgcccgttgtaaatctccataatccgctcacagacagcttcccgctgctgcttcttacttaaatctcctgtcactccataagctgaaggtccgctgcctcctatttccgcggcagcttccaacgccttccctgtcctgccggttatgattacctctgccccggagccgtgcaacgcctgggcaattccatatcccagtcccctgccgcctcccgtgacaaccgcccggcgtccttctaaatcaagtatcattccttttccccctctctctttccctgtatccaaacgaatcaatcccctccttttgcgttatgtggtttgtgttcaccaatcgtaattagcgattcagtttcgttatgtttcgttctttttagaaaatagtttcgttatgttgtcccaagcatagcacacggtttcgttaaaatcaataagtttatttccctttttctcttgttttaatgcttttttactttttcaacaaattttcagtacatatattgtgtattttttaaaaattgtttattttttatcaatattattgtgcatatactttagattcacctgttttaaaacaatcccatttcttcaacagatatacaatatgcataatatttttactgttttttatattatattgtctccattataaagtaccgcccaaaataaataattttttcttattgactattgaatcattttcgtttactattagcctaaataacgaaatcggtttctctaatacacggggggtattaattatgattaacggaacaactctttggaatcgctcttatactgcggatatgatagaaaagaccttttccggcaagacttatttgacctatcccaatcttcccgccaacttatatgacgcattatccttatctgccgcacgccgtccggacaagacagccgctgtggatgataacggcaccgcctatacctacacggaactgagggacatggccgaccatttttcttcttacctatattacatatcggatatcaagccgggaaccaagacaggcgtcatgatgttcaacagtgttgaattctgcgtaaccttcctggctcttacaaagctgggagccgtggtcataccgctgcccagtaaatacagccggaacgaagtgctttcactgacggcaaaggccgatctccagtacatcctgtgtgatgaaaagttttatgactggtttgtgccgttagaaacctccggcgtccatatcatgaagcccggacggggtaagaacggatttggtttttcccacctgtgcgcctcctatctcagccctgtgccgtctcttggcagggaagaggatgacgcgctcatcatgttcacctccggcaccacctctcagagcaagggagtcattatcaagaattacagcatcatgcacgccattgtctcctaccaaagaattttccagataacggacagggactcaaccctcattcccatccccatctatctggtaaccgggctggtggcgcttctggggctgaccctgtatgcaggcggaaccgtttacctgcacaagttctttgatgccaaaagggttctcagggatgtaaacgacaaggaaatcacattcctccactccgcacccgctgtattttccctgctgctaaggaaaaaggacagttttccttcccttcccagtctcaggcttctggcctgcggaagcagcaacatgtcaaaggaaaaactgacagagatccaccgctggctgccctgcgccgcatttcacaccgtatatgggctgaccgagacatgctcgcctgccaccatctttccgggcgatgcctccaccagcagttacattggttcctcgggccttcccattcccggcacctgcttttgcatactggacgactcaggttcacagatgcagacaggccaggtaggggaaatcgcggtcagggggaccgttgtcctggaccggtattatcaaaagggaaccggcgggctggacggagacggctggctccgtaccggagacctgggatattttaacggggaggggtatctgtttatcgtggaccggaaaaaggacatgataaaccggggcggagaaaaaatatggagctttgatgttgaaaatgagctgtacaggctggacgggatcgatgaggcggccgtggtgggaattccccatgatatatacggcgaggtgcctgtggccgcggtgaagctgtctcccgaaagcattctgacggaacagcagatacaggaattgctgaaatgcaggattgccaaatacatgattccttcccgcatcatcttcctggacgagctccctctcacacccaataacaaagtaaacaaatcagccatacggaaacttttcatgcagccagaacattaaggaggttacacaaaaatgagaaaaccagtttttatcaccggcgaagaagctgccgccatgattgccgacaacgcaactgtggcaaccatcggcatgaccctggtgtcggcggccgaaaccattctcaaggccattgaacagcgctttttggaaacaggaagccccagagggctgactctggtccattcctgcgggcagagcgaccgggaccggggaatccagcattttgcccatgagaccatgctctccagaatcatcggaggccactggggactgcagcccaggatgatgcagctgattgcggacaacaagattctggcctactgcattccccagggccaatttgcccagctataccgcagcatggccggaggcgagccgggaaagattaccaaggtgggcctggggaccttcatagaccccaggattgacggcggcaaaatgaacgaaatcaccatgagcgcccccgatatcagcgaggtggttactattggcggcgaagaatatatgcgctacaaacccattcctctggattactgcatcatccggggaacctatgtggatgaatacggcaatctgaccacggacgaggaggccatgcatctggaagtgttctccgccgtcatggcatgcaaaaaattcgggggcaaggtgctggcccaggcaaaatataaagtcaaagccggttccctccactgcaagcgcgtgattgtgccgggcgtattcattgatgcggttgtcatctgccccaatcccgaggaggatcacaggcagacccacagtttctatatggaccctgcctactgcggggataccaaggcgcctgtatcatccgatgacgtcctccccatctcgctgcgcaaggtcatagggcgcagggcgctgatggagctgtcgcctgacgatgtgctgaatgtgggaaccgggattcccaatgatgtagtaggccccattatcacggaggagggcatgtcggaggatgtgaccatcaccgtggaatccggtatctatggaggcattcccatgggcggcattgactttggaatcgccaaaaaccagtttgccctggtccggcacgacgaccagtttgactattacaatggacccggcgtggatgtcacctacatgggcgcaggcgaggtggacgcccagggaaatgtcaacgccacatgtttagggccgaagcccacgggagcaggcggcttcatcgatatcaccaccaacgccaaacatgtggtcttctgttcttcctttaccgctaaagggctggactgcacctttgagggaggaaggcttcatatcaaccaggagggctccttaataaaatttgtcaaccggattaaacaggtttcctacaacggcaaaattgccagagaaaagggccagaaaatgcactacgtaacagaacgggccgtatttgagctgcaggcggaaggactgaccctgaccgaaatcgcccccggaattgatatccagacccaggtcctggacctgatggaattcactccccgaatcagccctgatctgaaggagatggacatggctattttcatggagggggctccctttggactgagaaagtatatattttctaattaatacgcaacagttcaggacggctttttcggtcaagaagagtctccgtcctgaacagttccaataacatattcatattaaaggaggatttgtcatgagactagaaaacaaaaccgcaattgtaacaggtgcaggccgcggtctgggaaagggaattgccttaaaactggcggccgaaggcgccaaggtcatcgcagcagacatgtcaatggaaacagcctctgcaaccgctgatgaaattaacgctttaggcagcacagccaaggcctttgctgtcaatatagccaagcaggacgaggtaaaggcaatgatggactttaccgtggagtctttcggcacattggatgtcattgtcaacaacgccggaatcaaccgtgacgccatgctgcacaaaatgaccgcggaacagtgggatcaggtcatcgcggtcaacctgaccggcacattctactgtgtccagtatgcggctcagattatgagggaaaagggaagcggcgccatcatcaacatctcctccgccagctggctggggaatatcggacaggccaattatgccgcctccaaagccggcgtagtgggccttaccaagacagcctgccgtgagctggcaagaaagggcgtcacctgcaatgccatctgccccggttttatcgacacggacatgacccgcggcgtacctgaaaaggtatgggataccatgataagcaagatacctatgggcagagccggcagccctggggacgtagccaacatggttgctttcctggcttctgacgaggcagactacataacaggcgaagtaatcaacgtgggcggcggcatgattctttaatcatataaaacagtaggaggatacggatatggaaaatttaaaagaagtagtaattgtcagcggagtccggcttcccgtcggctctttcggcggaagcctcaaggatatttccgccattgatatgggcgccatggctgtaaaagaggcagtgaagcgtgccggtatagagccctctgatgtagatgagaccatcgtaggccaggtgggccagattgcggaatgcggttttgtggccagggccgtcagcctgaaggccgggcttcccgaatcaacatgcgcgtattccgtcaaccgtcagtgcggttcgggccttcaagccattgccgacgcaatgatggagatacagacaggatttgcggacgtggtggttgctgcgggcaccgagaacatttcccagcttccctactacgtaaaggacgcccgctggggcaccaggatgggacacaaggtgtttgaggacggcgtcatcgatatattgacctggcccttaggcccctaccacaatggcgtgacagctgaaaatgtagccgagaaatacaatgtgacccgccaggagcaggaccagtatgccctggaaagccacctgagggcagcggcagccatcgaagccggtaaattcaaagatgaaattcttccggtggaattaaaggacagaaaaggaaacattactgtctttgacactgacgaaggccccagggccagccagaccatagaaaagctggagcgcttaaaaccgtgctttgtaaagggcggaaccgtaaccgcgggtaattcctccagcttgaatgacggcgctgccgcagtggttgtcatgtccagggaaaaggcaaacgccctgggcgtcaagcctctccttaccattaaaggctacacggtcgccggcaacgacggggccgtcatgggatacgctcccaagctctccagcgaaaagctggcagccaaactgggattggaccttaaggccattgatatgtttgaaatcaacgaggcctttgcaagccaggcctttgccgtacggcgcgaccttggtctggatcccgataaagtaaatatttacggcggaggaatctccatcggccatcccatcggcgcaaccggcgttatcctggctgtaaaggtgctttatgaactgcagcggaccggcaaaaaggatgccatggtaagcatgtgcattggcggcggacagggaatctccatgtactttaccaaagactgatatagggattaaaaccggggctgaaatccgtgatggaggattttggccccggttttcggtatgcgtatgctttgttgtatttcagcattcacatcttactatatccaattttcaaatcacctgaatacctgcagataataccacggcggaaacagcccgcccacctggtccagtcccggaaagaacctccctgcatccacaaaaacagggcagaatacaaggcttccaatgaccagaaatggtatgatgcagcagaggacctgctgcctgcggcataccaggcgcagaatccaggccgcccctatgacaacgcagcagtaaacggccataaccgcggcctctcctggcagggatgtcatcacgcctcccgcccacaaggccagcaggcctgatacgccggccatgacagcaggagccgccatggacgccacacggcagggtatcctgtatccgtatgaaagcggaaggaacaatccccgctcctcatcaccgcacatgactacagccccatacagaccggtgacgaacacataaacagccaccagacctctgacgggaaatacatctggctggctgccggcaacgtctctgtcctctccatccctgccctggaactggtactgaaaccggaaggtggaaccgctctccagccattttgcgtaaagctcccttgcctgtgcggctgctttctccctggcttcgccgcctgccgttcccagagggtcaaacaattcattttcagccacataatccgccagcaattccccatcgtatatctccataagagcggcaaacacggtctccgtggaaagggccgcagccacggtggacggcgccgaatatacgccaatggaacgcttataggatttggcatccagcttctcctccagtccggcatataccacataaccgcattccgcccgccgggatgccacttctgcctttaccgcttcctcgccgcggcacagatagaagcggaacattcccgcgtcctctcctctcggccggttcacaaggctgtccgccagggcattgcccagcgcgttctccccgctctcctccacactgatggctatgttcacgtcccggctcccctttttctgggcctggcctgctgccagcacccccaggggcaggagcaggaggataaacagaaaggaccattttctcatataacgcttgcatgacagaaaaaaccacatagcggcccgcttcattccctgaccacctccgctcccacgctgagcagaaaccctgccagggccagggctgccagcttcatgattactgccaggctaaaggacgacgtaaccaccagcttcattccctccatcagcatatagttgggcagaaacggcgccgcggcccggaaggtggcgggcaggaacaccaggggaagaaatcctcccgacagaaagtgcatggcagtcaccgccagaaacagcagcataacgcctcccataaggcttccggccgcctgatagataaataccaccatggacgccgcccccaggcagaccatcagcagggcagccagtccaggcaggtttaattctatcagtcccgcaaaggacgctcccagggctgtacacagggccaccgccataaacagcatccccagccccaacatccttgccgcaatcagcgtcccttttcccactcctataagggccaactgacccttcatggacgcggagcctgaggcaagataagctgacaccggaatggcgctaagcagcaggaacagcacagcggtgctgatgccgtaaaagtgaatcgtatccacatcgccggtggcgctgacccttacattcttaaagtaatccatacgcggcagactgtaacccatgtaaatccggttcaggtccgcctccaggccgctcaccgaatcagccatgccataaaggtacagcagttcgtctcccgcatagattcccgcctggccggctcccagagtggaggcgcccgcgtcggtcagttccttgaaaatgcggctttccagaccggttcccctgggcagcagaattttcaccggagtattggttccgttcataatatcctgcacaaaaccctccggcacctccatcaccgcgtatagtttccctgcattcagcttatccaggcattcctctttattcatatattcaaaatcgcagatgctcttgacgctttccagcgaactgaccatggccagcgcctttttcgccaccgcatctccttcaggaagcactacccctacggtaatcctccctgccgatgtctccccatacagcatcctggctgacaaaagggcaatcgtacccgctaaaagtaacagcacgattgcccctgcaaagatgtggggaagctttttacatgctcgtttcagctcaagcctgagataaaccagacgtgcagacatatcttcccattccttttatcttattagtacatggatattcccagctggctgcataatcccatgacgccaaacagcatttccatccctacattggtccattcctcttccgtggcagacagcacattcatggtctcgccctctaaaggactgatttcaccttccagcggctggtagtagtattcaccgctgagaaccacattcacggaatcatccataatggatgtctccagagaatctatgttcacatggacggatttgcccttttccagctggtccactgcgcctgttgcggaaatcttcacaagctgcgaaccatttcctcccacttcgcctgacaggtggtagcttccatccttggaatcatacgtactggtatatgtaaaattataagccccatcacccggaacagacagatccagtgaaaggtcgctggtcagtacgcttttatcgtaggttccctgcttcaccatatcaatactcaccgtatccgtggcatcctccagcgtgatgctggccagagcattctgggtcagataggctccgccctgaagctggcagctaaaggtcactgcacggtatccctcttcggaaacatctgtatcatccaaacggagattggtggagccctccactgctgccagacgtcccttcttatccacataaaccgtcatgtttacatcggtcagcgccttgtccagatattctatcatctggtccaccatattctttgcctcctcgtaggactgctgctgcatctcctctgcggacatatttccggttcccgacatggttccgcccataagctcgctcatcttcacggtggtctccagctgacgcataaagtctgctttcagggtctcatcctgaaggaagaaatcagaggactgacgaatgaattcaatcatggaatctttgctgacagtcacattgtatcccttgcagctcacctgcgcgccatccatggtgtaggttcccttatctgccttttcaaccgtcagggcagccttgaaattctcctgggccttgcacccttctttataacggttaatcagcgcctccatgtcaaagggctgtttgccttctgtctgcaccttttcagcctcgtccatcagctccgtgaaataagcggccatgccttccacatccacgccgttctgctccagcagaggtcccacggtcggggaattcttaatacggtctgccagcccatctcccaggtccacggtaaacaccttgccggacagctccggaatcgcaagcatcagggtgtcatccccataatatgcgttcagattggcaaggtccattccgctgtagattactcccatattgaagaagctcctgccattggtcttgtcgtcctttgcctggaagcgcagtccgcttcccgcataggcattgaccgtctcatccgagcagctgtccatcttaagtgtcagaccgccctggctgtctgctgtcttcactgtctcagcaaagtccttcagtccaaacagctcctcagagggataaacctgtccttccgggaacacattttcaaaggcttcaatgacaacctgcttggggtcctttgtggccatcttcacataagccagcgccacaacggcaatgacagcggcaatggcgacaacggcagacaataccttgataaacttcttatttggctggggttctgccggcacggtcacagctgttggagccggctcttcctcttttacggtttccgcttcggccgccggttcttcctcttttacagcctctgccgctggttcttccgcttttacagcctctgcttcggctgccggttcttcttttgccgggtccggaccgttgtcttccggtgtctgattgtcctgttccatcggagccccgcactgggtgcagaatttcacatctgcttcctgctctgctccacacttggtacatttcatatttctctctcctcccttgtaaaaggatcttcccgctgccctgtatgctgccgcagcggctgccctttcgttttgaatctatcgaaattggctaatcagctcttttgccgacaggccacaatcgattccgcttaaaactccgccttttagtatgtacatcttcgtacacagggccagctccgccagctcatgggatgtcagtatgacagccccgcctgaagccatatattccctgagatagttccggataacttccttgcactccaaatccagggcagcccctggctcatccataataaggacaggagcatgattggacaaagcacatgctatgccgagccgcttcttcattccgccggaaagctttcccaccgtccggtccagcatgcggtccacacccagcatggaagccgctccgcctttcaaatccgattccatctgcttcctgcttcccctgtaccacaaaagcaggttatcccttacagtcagttcctccataagcggattctcctgaggcacataagccgcctcctccgcgaatacccgcggatggcccgacgcttccctgccgttgtatagaatgatgccccggtccgctttctgggcgcctgccagaatggacaaaagagtagtcttgccgcagccgttataccccacgatgcccacacattctcccggagccaccgtcaggtccactcccgctaaaatattctgtctgtgataggacttgtaaatccctgatatctccagcatcgccgcaaccgctcccgtaaaaaacaatatatgatacaggactcagtgtaccatatattgggaaggaatgcaaaacaataattattaacgattccttaatattgtgggactaaaaagtacggttttacgttgtttttcagcatatttgtgactttaccgtgtctaatagggcggtatcagaaagtagaaaatggcatgaaatcaggcaggtctgtttacacgtcccgatcccgcctgcatcatgtaaccgaattaacgtttaagcgacatgtgatgttgtcggccgcagggaccgccgagaggcatttttcgttaccaaggagatttttataaactctgatgaatcggaaatcttcgatgaaataaaacatttatagccgcactatctcattatattgtaaaatattatcttgattaacaaaaggcgcctttacggcgccttctttataactgtccttccttctttaactagtataactcgatttaaataagcttacaatttaagcattggtagtaatctgatttcttggcttacgtgtccgtgctttgggcgcacgtttcccttggttttcaggataataatgtaaacttattaaaatcgagttatactagtacaaaacttttccagttaacaattaaaacctactacttttttgtcacagaaatcacagttccggtgaatgcttctgtttcttctagttttcctgtataaatcacagaaactgtatccccttctttgacagaagacaatccctctggcttttctccctcaaagctaattgcataatcaactccattctcatcagtgatagtaaacataaaatccttaatgtcgctgataatgcctgtgatagtcgactcgttttctgcagccatgtcattttcagcagaggatgcatccgatgtgctttccgtcctggaagtgctaaccatctgtgtggacactgcagaggatgttgtcctttcctgtgcagagcaacctgtagctaacatcagtgttacacaagctgcaactaatatactcctttttttcatgatttaaaacctccttgtcttttataaattcataatattagacgtaatacatttcaaaaaagttgcgactttttactattttttgaacagttaaaatgtctatttaggtcagtttacaagagactacacgcagaccgtgaaacgggctgctaacaacaaacggcggtatgctcccggagagggcagcataccgcctgttttgttgtctggggaatccaaaggggcttgccccttggcacacgactttgcgaagcaaagtgtagtgtgttatacgctctgtcggcgttgccgtgaaaatgccgttgccgccgtggagggcaacggcatttgaagcggcaggaaaacaggctgtgcttgcggggcgggatgccacaagcgcaggactgttttcgccagcagacagggcgtatatgaagcccccggccctcgcccccgcttggacatcgggtcaagttagcccgatgttgtgtatagacactcggcaaaaatagcagaacggacggcaaccgtcaaggctgaaatgaacgggcttacgcccgaccttgaccgccgccgcccgtcccgctgaatgggtagacaagacggacaatcccatactgtgcttgtccgccgtcaaagttattttgaggctgtccgttctctcaaaattagagtgggcgggaaagccattttagggctttcccgccttgattactcataagcaaagacgggcgaggctgtcaacggcggcgctgtaagcgccgttcatcttgaccgttgactggctcggctggctttgctatctcccagacgaggaattgttgaaagatgttataatgaaatccaatatctttgtattattccacttttacttaaacctactgtatcagaaatttcgttctccaacatcccaccatttttaataatcgttctttgtgaagctacatttcctttatcgcaggttaataaaaccttactttctccgaagtcgcgacaaatgggcaaaaccagttttagcatttcagacgcgtaccctttttgcctttctgatggacgaatactatatccaatattgcccccataatttttaagaaaatccgataatgggtgacgaaaatcaatcattccgacaagaaatttgtcactttgtcttaccgctaaaaacacttctgatggaacatatccagttttatacttttttcttaatcttccttcaaaatcaatccattcatcaaatgaatagacatcttcaagtcctgcacaaccgtcaaagctatccccattttgtgacatttcttctttgtatgacattacttgttctgcataaagtttacatggcctaactaacatcaatccacacattactttttacctcgcaatttctcgattgtcgctcgctatttccgttttccccgttgcggcacatagcttttcgtcaactcggatttttgtacaatccgggtcagccattgtttttcttcctccgtcagcttggtgtagcgcagttttgtctgcttacacaacaccatcaacaggtgttccgcccgactgcctttgaagttcgccacttcctccaaatcccgcttgagttcgtccacaatggtattctccggggcgctgtcgctcctgcccctgtgtgcttcccgtatgtcctccataatagcgtctatgtcgtgatgtacccggctgctgaaatagtcgccctcccgcacatgggcggcttgcaggacaccagcggtcttgtcatgctcccccggctggtacttctccataatttcggccctcgccacatctacccatgcgttcaagttctgtatctgtgttgcggcgataccctcaacataaatctgtatatcggccagcagcttgacaaaatccgggtgcgccgccagttcacaaagcaaggcggtatcaattcgcccacttttcagcaggtcaatcatttcatcactcaaacgcaggtctgcaagatcggcgtttgggtgactttttgtttcggtcagccctaacagataatcagcggtcacgccgtaaaacttcgccagcttgataagggcatagtggctgatgtccttgaagtcgtccgcttcatagctgcccagcgcagacttggagagttgtgtctgctccgcaagctgttccagcgtcagcccacgctccacacgcaggtctttcaagcgttcctgtattgtcaacgccaatctacacaccccctcttatgcttatttcatgctttcttgacactcgctgcactctctgtcatggatagaaatgatacctccgcatttgggacaagtatatttccctttctgctgttccatgaacctttccaaaccgtgctgacgaacaaactcgctgttctccataaggctcgcctgataccttttgttgtaacttttttcaaggtttttaatcagcttgcaaggataatcgggacattcaaaacaataggacagccctttgcccttgatacaatcttttatcttgcatttgcggcagtgttccggtttgcccatgtcgctgttcaagcaaccggcacacggctttttatgataacaatgcttatagcagaccaaacagttcatgccgcagggggcaaacatagccgtatccattttttctgttggcattttcatggctcgccctccttgtcagcttacggtttctttcattctaccacaattccgagagcgtggaaatagtgtgttttccagcgggatttccaacctttcggatatacgggacgggcggtcaaaaaagtgtagacttgtgttagttcatcgatggacaagcacaagtgaatgaccgtccgaaagagatattaccggctggggaagtacgccgtgaccccgcttctggccactgtcccgaagtagggagagcgtaccaatgccgggatacgccgcaggaatggggtaggaacggctttcggggaaaacggcagtaaagcgaaaatggaggaacgcatgagcaaaaaaataccagggatagagcgcacaccgggcggcggcttgccccgcatgaccccggcgcagcgcagacgggcaaacgccctcattcgcaaaacctgctgcaactacgataacggcaactgcctgttgctggacgatggggaggaatgtgtctgcccccagtctatctcctattccgtctgctgcaagtggttccgctgggcagtgctgccacaggacaaggcgctggaggcggagatattccgcagcgccagcgtgaagcggtgcgccgaatgcggggcggctttcgtcccccgttccaaccgggcaaaatattgtgaagcctgcgccagacgggtacataggcggcagaagaacgccagcgaccggaaacggcgcagggaaacggacaaataggggctgacaaaagcccgtaaatcaaggacttttccgggctgttcggggcggggctgtgtgtttgtacgccccgcccccgaaacagcccccaaactgtccgcaggagggaggattgatagattgccgcaatacgcaatcctgcgatttgcaaagcacaagggcaacccggcaaggccgctggaagcccataacgaacggcagaaagaaaagtatgccagcaacccggatattgacacagcaaagagcaagtacaatttccatatcgttaagccggagggacgctattaccacttcattcagagccgcattgaacaggccgggtgcaggacacgcaaggacagcacccggtttgtcgatacgctgataaccgccagcccagagtttttcaaggacaagcccccaaaggagatacaagcctttttccagcggacggctgactttcttatccagcgggtaggccgggagaatatcgtgtcggcggtggtacacatggacgagaaaacgccccacctgcatttgaccttcgttcctctgacacaggacaaccgcctgtgcgccaaagagattatcgggaacagagccaacctcacaaagtggcaggacgattttcacgcctacatggtagagaaatatcctgacttggagcgtggggagagtgccagcaagacaggcagaaagcatatccccacccgccttttcaaacaggcggtttccctctccaaacaggcaagggcgattgaagcggcgctggatggcatcaacccgctgaacgcagggaagaagaaagaggaagccctcgccatgctgaaaaagtggttcccgcagatggagaacttttccgggcagttgaaaaagtacaaggtcacgattaccgacctgctggaagaaaacaagaagctggaagcaagggcaaaggccagcgaaaaaggcaagatgcaggacacaatggaacgagcgaagctggaaagcgaattacataatatccagcggctcgtggagcgtatttccccggacgtgctggcggaactgaaacaacaacagcagtacggaaaggataggtgattttataggcaatatggagcatatcagatataaaaaagaaacagaggtcgtgacctttcaagggaaagaaatcacgctggaaaatctctccccggtattcaccccagagcaggaagcggcgaaccgccgggagttggaacaacagctttatgaggtgttccgcaagtacgccgacaagcggcgggcagcggaagccggggcgtaaggttttccaaaggcaacattgatttacggggctgctggcagtataatagtattgtcagcagctccgtttctttttgaagaaaaggagcgacaaatgaacaatcgaatagacgcgatttatgcaagacaatcggttgacaaaaaggacagcatttccattgaaagccagattgagttttgcaaatacgaattgaaaggcggtaactgcaaggaatacacagacaaaggatacagcggcaagaacacagaccgcccgaaatttcaagagttggtgcgggacattaagcggggcttgattgcaaaggtcgttgtttacaaacttgaccgtatcagccgttccattctggactttgccaacatgatggaactgctccagcagtacaatgtggagtttgtttcctctacagagaagtttgatacctccaccccgatggggcgggccatgctgaatatctgtatcgtgttcgcccagcttgaacgggaaacgatacagaagcgggtgacggacgcttactactcccgcagtcagcggggcttcaagatgggcggcaaagccccctacggcttccatacggagcctatcaagatggacggtatcaacacaaagaagctggtggtaaacccggaagaagcggtaaatatccggctgatgttcgagatgtacgcagacccggcaacctcctatggcgacattacccggtactttgcggaacaggggattttgttctacggcaaggaattaatacgccccacgctggcgcagatgctacgcaaccccgtctatgtgcaggcagaccttgatgtgtacgaatttttcaaaagccaggggacggtgcttgtcaatgacgccgctgacttcaccggcttgaacgggtgttacctctatcaaggccgtgatgtaaagccggacaagttgcacaatctcaaagaccagatgttagtgcttgcgccccatgaggggattgtcccgtcggaaacatggctggcctgccgcaagaagctgatgaacaacatgaaaatccagtccgcccgaaaagccacccacacatggctggcaggaaaaatcaagtgcggtaactgcggctatgcgcttatgagtatcgtcaaccgggtaggccgtcaatatctccgctgtacgaaacggctggacaacaaaagctgcgtcgggtgcggcaagatttacaccgccgaactggaaacggtagtctatcagcagatggtaaaaaagctggaaagccacaagatgctgacgggcaggaagaaagcggcaaaggctaatcctaaaatcgccgccctgcaagtggaacttgcccatgtggacggcgagattgaaaagctggtggacagcctgacgggggcgaacaatgtcctgctctcctatgtgaatgtgaagatagcggaactggacgggcgcaagcaggaacttgtgaagcggatagcggacttgaccgtggaagccatcagcccggaacaggtcagccagatttccggctacctcgacacttgggacagcgtatcctttgacgacaagcggcgggtggtggatttgatgattaccaccatagccgccacaagcgaagccatcaacattacatggaaaatctgacgggcagcacacctcccgtcagaccgttaccctgtgtagtcccttgtatactgtactttaagaatgtataaacttcatgaatatacctgtttttgcatttcattagtatccataaggtaaatcctgacctcatagttcacctcttcccttaatcgctcccttatttcattacatgcatgtccaaaatcctcctatcttttaaaacgaacccagaccgtcccctcatacctcttctctttatcaaaacagcccttagcaatatcggggccactggcatgcttcaatatgcatttattttcatcaaaagactggtaacagttcctgcattctgttgcattgcacatctccgccaaattatatattgtcttcttgcattcatacaggggttgtcacactttttcatctagtataactcgatttaaataagcttacaatttaagcattggtagtaatctgatttattggcttacgtgtccgtgctttgggcgcacgtttcccttggttttcaggataataatgtaaacttattaaaatcgagttatactagtccatataatattattatctcgatagagagataagaaaggagataattataatgaccgatgatagaaatattcattgcccaacaacatgtccaaggagctgcccatgcccgattcttttggagattgctacctccattgctaacgaagaacaggctcttgcctgcatattgaatgcagagtgtgataaaataagcaaggtcgttgcggcttatagcgattacgaaaccttagtggccattgatacatccgttcagtctacactggaccggattataagcctcgagggcgtattaaaggcaaaactggattcaatcattccattactgaacgattgcatgtaacaagtccgtaacaaccaggtggtctctctttatgaattaaataatatgtgttaacctctccatattccggaggacttaggtcctccggaatataacttcattcataccttggtatgcattggtccttataacaatatagataacacctcttaataggcttaaaatctgaaggatatcttatctattatctatataagggccatatgaaaatacgagataaaagtgctcttatcatatcaatacttatcccattagcggttggcacaatgtctgcattatttagcggaaatatgtcatcatactctattttaactcaaccagctttcagcccaccgggatttatctttcctgtcgtatggacaatactttatatactgatgggagcttcctcatatatagtttattcttcaaatagtcccaataaatcgttaaggaaagaatcgaaggtggtgcaaacgaaaaagcagctttgatatttcgataactgccctttcgtttgcatcagtttcgatttttcctggttgaacaaaggcgcgtccgggtagccgttatatatggactttcaatttccccagccttttagcgaagtatactgcatatggatgcatggcagccagattcggcgtccggtgtcatgtttatggcatcagaaataagcctccaaaggaagcttaaaaaatattcagttgccttttttaacatagaagatgcggttctggcattgtacaaggctgccctgccggtaaaggaatgatccttccgccgcaggaagaacacctgcagatatccttattgtaaagcagccggatcatggcaggggcatccagatctttcagccttgcgatatactttctacagccgaggagattccggcacaaggtgatcttcttattcttgttccgggatgacagcaggccatagtggcgtatccggacaaaacgcttcggcgggacatgcatcagaaatctgcggataaactcctcaccggaaaccgtaatctcctcccactggccctggtttttataatcttttgcagtaaatgtgaccatagaatccgtcatgcatttgatacgataattgctgatggcaatccggtgtgtgtaccttccaaggtacctgatgacggattccgcgccatggaacggcttcttacagtagggtatccattcttttttgtaacaggtatccaataattcctgtaaggcataatggttcctgtaaggctctgccgtaccgtggaattcgagttttccatctttccatagctgtttcagttcagcaagatattttccgcggaacagccgggagaccaccctgaccggaaggaagaagtcctccccgctgcctttccagtgatttcctgcatccagcccgcctcccagaacaatggcatggatatggggatggaagttcatggcgctcccccaggtatgcagaatgcagatatagccgatgtcagcgccaaggtatttcgggtcagccgcaagttcacgcagggtatcggacgcggcatggtaaagcgctgtatataaaagtttctgattgctgtagataacagggttcagattttccggcacagtgaataccatatggaagtatggcgcgtccagcagatcctccctgcgcgcgtcaacccatttttctttcgggaattcctgacacatagggcagcatctgtcacggcaggaattatagtggatggaaatacagccgcaatcctcacagacgctcacatttacgccaaaagcaccggtcttgcagttcatgatgtggtaagccgcctttctctgggcaggggaaacatcatgggaagatgcataggaaggataaaaacggttaaaaacatcctggattgtgcagtcagtgttcattcctcaccgccttgcggaccatcgaacgggctgcggatgccgaggagggtcttgttgcttacatggaggtagacatcggtagagcggggatccacatgcccgagaagggactggatatatttgatatcggtcccgctttcaaacaggtggctggcaaaactgtgtcggcacgcatgggaagagacacggcgggtaataccggcaagcctggcgctttttttaaagaactggttcacactggttatatccaggtatccaccagtccaggagcttgggaaaagtatccccctgggccggccgcatttgtaccaatactcggtaagaaggtcaagattcttccgggagaggatggtatacctgtcaatcctgcctttggtttcacggacatggatggtcatgttggtacgggaaatgtcatcgtaatggagatggacagcctctgagacgcgtaatccggaagagtacatcgtcgcaatgatagctttatgcttcaggttttgggtggcctcaatgatcgcgtttatctcattacggctcaggacggcgggaaggttccgttcccttttcatggcaggaactatgtcatcatcccaaaggatccagagcacttttttgtagaagaacttaattgctgaccgatagtggttgtgagtttcgggagacctgccttccaaacgtttggcagagaggaaactttccgcatcgtcaagtgtaagctcagaggcggttttcccaatacagcggagaaagtaattgacattggcacagtacaagtttatggtactttcccgcaggttccgtttttccgcttcatagcggatagattcaaaaatatcatcgtacataataaaacctcctgaaataagcagcgttgatcgtggcagctgcctgtcaggaggggcattggcatcataattccgcttgcggaagacaccaaaaaatgctattgtattcataggcagtggaggtttccgtatttggttgttttgtgtggtaacttaacaataccgtattgcggaagatttttccactgctttttatttagaggaacgtaaaaactgcgccacagccttggcaggccatcgcgtagcgattttgttcaatcgaaagctttgttgctctattgtatacagttatttttcaacttttgttggagtattatcttttttggtttggaccttttcctatttgcttttatctggctcattgcactaattctcattgttaaccctctatctgcttatttacagattccttatctgatatggtgcatatttgccgcatacttaaatttctctattttcctattaaattgatacgtgaagtgaagcggctaagccaaacttatccggttcttctatatgccgtccgccggcggacattgacggaaaccggcaaagaccgcgttgtcctgtatcgaatatgcaagtatggcagtaaaaaatacaatacaacatcagaagggagacaaactgccgaatattttccgccaatcttacaaaaactactacggacaggaggtatcatcatggcaaaagcaggaatgagaagacccagcccttacgacgctgataatcacggaaccgagaaccaccacaaaatgaaacaccccaaaaatgagcaggcccaggttcccgaaatccagggggctgccaaaaacggcaacgccaaagcaggccctgtcaatgctcccaactgggcaagagacgattataaaacaggagagcattaaagacaggaaaaggcgggcctggtcatatccggcgcccgccttcaccccccccccacccagtaaacgcttcacttcctcccggttcatctccactacctccagggcctctgcctcatccagtattttacatgaaggatttctattccgggttcttattatccgccttcttcattgtccctttttttctcccttactttcctgtaccctgcacggcgggtcttttcacgaacagcctcactgccataacccgtcctccaggaccgccatcatcagggccagatgcagattcatggcagccgtctcatcgtcaatatagtggacattacgctccatcttcacccgccccggcagcagttccattgcatcaaactggtcctttgccgctttccgcgactggtattgtacatatgcatccttaatcattgcccacaacctcctttggttattataacgcttggaggctgctttttcccttgttttctgcccggaatacgcctgccgctatggtcagctgccaggcggctgcgcccagccacgattcatactcctgttcaggataaaggtaaacgcaaagaaatcagccgtgaaaaggccgtttcaaaaaagagggcactgcagcttgtcctgcaataccctcctgtgttcttatatcaattttcaattaagcaatcctggacttagccagctcagctaacttcgcgaatccctctgcgtcattgatagccatttcagacagaaccttacggtttaagtcaacctcagctaactttaagccgtacatgaacttgctgtaggacaggccgttgatacgtgctgcagcgttgatacgcgcaatccacagctgtctgaactgtctctttctctcttttctgcctgcgtaggagctggtcagggcacgcattacggactgctttgcaatcctgtactgcttggaacgggcacctctgtagcccttagccatctttaagactctattgtgtttcttctttgcatttaaaccgccttttactcttgccatcggtaattcctccttctacaattcaaacttacagatatggtaaaatcttcttcattacctttgagttggtagcatcggtaacgatatcttttctaagatttctcttcctcttagtggacttcttagttaagatgtgagtcttgtaagctttattgcggactaacttaccggttcctgtctttttaaagcgctttgctgctgctctgctggtttttaactttggcattgtaaatttcctccttaaaactttctattttaacgttttgcagttaaaaacataaccatgcttcttccttcaactttggagggtttatcgataactgcgatatcctttaaactctcagcgaaatcatccaggatgtatttggacttgaacatatgggccatctcacgaccgcggaaacgaagtgttaccttcactttgtcgcccttctccaaaaactttctggcagctcccaccttggtgttcaggtcgttggtgtcaatgttgggtgacaaacgaacttcctttatctcgattaccttctgtttcttcttggcttctttttccttgcgtgccagttcataacggtacttgccatagtcgataatcttacataccggcggctttgccgtaggtgcaatcttcaccaggtcaagctctgcttcctgagccagcctcagcgcctcttttcccggcacgatgcctaactgctccccgtcctcgccaatcagccgtacttccttgtctctgatttgctcgttaatcattaattcgctaatagtcgtacacctccaaataagtcatgttgttctggaatcagcatgcccccgttctttccctgtagggcaaaaaataaagcggacagcccggctatccactttctcacataaaaccatctgctgccctatctcacatggaaatatccggaaataatacagcacatcgtttcatctataaacccgggtcacttactcgtgccagggtgaggcggatacctgctttcctgtcagtcgttctcacaacttatattaatctactacatttgaacgtatttgtcaactctaatttcaaatttttcttataaacttttctccaggcttgtctccaccctgcctccggcaaaaggccggggacgccctccggttccccgcaagacgtccccgtcccctcacacatccgtcctgattctgaatctatctggccttaaaggtactgcatctggtctccgtacattcgcaggctccgtcaccgctgatatcaatacgctcagcactgcagcggtgttcctcattgtagacacattttactgcgtcgcaggcaatctccagccttgtctcaggggtcttgaacaggttggtgaacttgcctcccttgttctcgtcaaagctcgcacagcaggtctgctctgctgtcttagccttgttcccatccactgcaatggctgccttgcagcagcagttatcagcgttgtgcaggcagttctttacactgcattccagcttggtcatcgtccttacctccttctcctggtctttattcttaccaatgacaaggatagtatgtacggattataatttttgattcatgagccgcagggcttcaatgcattttccttcactgccgtccatattgtaaagctctccctgagtcacaaaggtatatacctgaacgtcgtccacataggcgcctttgcctccgcttacgctgatggtgaaatccgagggctggcagctgctgaacttaagctccaccttccgctcctccttcacgtccacagtccttgtctgggagcccatgcgtatggtcagcctgcatttttcctctgcccctgtcctcagcctcacataagtatcttttcctgtgttgcctgtcatccggctgcccaggttctggtaaatatttccgccggagggaatcattgcggattttccgttctcatcctccataatatagcttcctccggaaaaacgccatccgtccgcgtcaagggcaaactgggcgttgaacagcttattgtccccgtaatcccggtaggtccatatgccgtatcccatggtagaatttttaagaatgggaacaacgccttccagatacaatgatttttcatcgtcccgcagctgggcattgtgctcatatccaactgtattgtccgtaaacaggaactggtccagatacaccggcttgcctccgctgtacacatgaaggcggttcaggaacacgggaaccttttccagtgcttccgctgccgtcacgcgttcatgctcattcatgaagcccatgggaatgccgtacatcgcgctggtataggcggcgcttccgctggggaaggtggaggaatgcatgaagccctcccggcttccgtccttgtgttccaccgggtccacatccagtcgcacttccatggacagaccgggaaacacagtctggctgtcagccagaagttcatttaaaaactggtcgtagaacccgtaaaatacgcttctggcctgggaatcctttgccggaaaatacaagtcgtcgtagccggacagcttgtgcccgtacatctcctccagttcttccagctcataattttccctggcgtaatccacatatccgcagtccctggccatgctgcgtccctttaccccttttcccagggacgcgctggcatccgtgaagttccagaagtcctcccaggtcaggaatcctccgcagaaattctcatgggaggatgccgcctgatagagacggcccacatattccagccaggccgaccgctccgtgccctcctgcatcagcccctggtaccggtccatcacattgccggccccgcagtaatcccaggtgtatcccaccctcagcatcacgctcagtccccgggcagcggcggcatccatgacacggtccagcttgtcccaggcatactggttgtatgtgcatggggacatgcctggctggaattccctccagggtaccaccagaatgatattgttaaagccgtcctgcgcaatgcgggccagctcctggtccatatggcggctctcgctgttccagaaattgataacccagtcatcggaatagtaggtggctgatttgagataaccggctgtccccgcggcatggtcctctgccctggcaaagccggatgtaaacagaaacgctgccgtccccagtatggccgcggccttcatgtatggtcttttcattggttctttctcctttagctgtggatcttttctccgccccgttttaactcaggccacacagtaagcagcatggtcccgaagcaggctcctcctccgatgaaattggatatgggctctgccatcagtattccctgggttcccattccgaatacagtgggcagtatgatgataaggggtatgacgatgatgacttttcggaaaatggaaaaaaataccgcgtttctggattttcccagacccacaaatacggactgtcccgcaaactgaagggacatcataaaaaatccaaagaaatacatacgtatggccgggattcccgcctccaccatatcgccctcccggttgaagatgcggatgaaaaacgccggaaaccagtccacaaatccccaggccaccactgtatacagaatacagaccacggacatgaatacaatggacttctgtacccttttatactccctggctccgtagttaaaccccagcacgggctgggcgctgttggtcaggccgtttacaggcatggaaatgacctccctaaccgagttgataacggtcatgattcccacatagaggtcgccgccaaatttctggagcatggaattatacatgatctgtacgagactgttggtgatggacatggtaaacccggacatacccaggcctacgatgcgaagcagcctgccgcagtccagcctcatggcggaaggccgcagcttcaggatggtccgcctgccggtgaggaaggccaggatccacagggctgacagcatctgagaaaggatggtggccagggcagcgcccctcacccccatgttaaaaacaaagataaagacggggtccagtacaatattggtgaccgcccccaaaagcacggtcatcatgcccacggtcccaaacccctgggaattgatgaagctgttcatgcccaggcctgtcatgacaaagatattgcccatgagatagacggtcacataggcgtccgcgtagaaaatggtggcatcgctggccccaaagagatacagcatgggtctcttgaacatcagtcccaggaccgtcagcagaatccccaccgccaccatcatcacaaaggaattgcccatgatggcctccgcctctttttcgttccccctgcctctctcaatggaacacaggggagcaccgcccatgccaaagaggttggcaaaggcaatcacaatggatatgatgggcaggcagagccccagccctgtcagggacagggtggcgttctccggtatcattcctatgtaaatgcggtccacaatattatacagcacattgatgagctgcgccagggtcatggggaccgccagcttcatgatatttccaaccacactgcccttggaaaaatcattcttcttttgattgtccgattgtttgtccgattgattaaccgactgtttcatactcccaccacatttccgtttgttctgtctgttttgtcccggccgcaccggatagctttagaaaaatgccgccgtcaattctgtaccgctcccaaatcctctgccctgtcaatgtccttaagttcttcctccggcacctccatggtccacacatcctccgggtgcgccttcatgattacgcttcctcccctgtctccgcgaagccccatcagttcttccctgtaggcgccggcgaatatggccggattcccccgctttccctgatggcacacacagcccatgcccttcccggccagccggaaaccacgtatgaattccttcagggtgaacggactcatatacggctggtcagccactgaaaacagaagcgcctctgattcaggagaggccgaatcagttcccagcctgagggaagcggtgattccctggccgctgaatctgttaaggaccgcccgcagtccctggctttcggcctgctctagaatctcctcatactggctgaccaccagaacctctgtctggtacccctctttttccagctcccccgccgcacggcagatgcagtcaagcccatgacggtaaagcgccttccccttaaagggtaccagaagcttattagagccaaaacggcttccaaatccggaagccatatagataaacgatatcttcatccctcataaccatcctttaaaataaccgggcagacacgtcctggtccagctgtccgcttgcagccccagatgtctctcccatgccctccagcatttccccggccagcgctgcttcctgcggggtgtcggcctggttgaataccggcaggacatccgctcccggatagtccgcccgcaggggcagcagatatccatggtttatcagtgtcatcatatcttccttttgtatgacccagtccgccctgttttccggattccggccaagtccatccgccgcactgccccacggcttgcggttatcctcatagtgtctgcggccgtggcggttcatcagagccctggcctcctcaagcctcaggcagcagtcctcagcccgctttccaagggatgacaggccgttgagacataaaatcatgtctgtattgtccggtatcaccggctccccggcccttggcaccttcaaaggcaggcgtctggaaccgtcggcctccaccagcaccaaatccaccagggaacaggcctccctatataattcccagcctgtaaatgcaatctttcccttctccgccagccttccggccacagccaggccgtggcatcccagaacggtcctgatttcttccgcattgccctcaaaggctccaaaagcaccgggacgggccatatgggtcgttgtaaccaccagcaccttaagtccgcgtctcacggcctcccaagccagtctgcggatggtggatgtctttccccccgcccctgccatggatatcacaaaagggcccggtcctttcacggaccgtgcctgctccatccgtccctccagccccaggccatgccacaggctgtctgttccggtccatatgccatactcgtaaaaataagccctcatggcgttttctccacttttacagtcgatacaaaaacttattttgatactttgactattttatcataaaacagtaaattgggaaagatgattttcccttccattcaaaaacttccattcaatcgagtaggaggaaggcgattatttcgccttccgacctctcacaccaccgtacgtaccgttcggtatacggcggttcaatcaacttaacatgtaacagccttttcggcgtagtagtcttccatggatacaagaccaaacttagctagtctctctttactgatacaaatgtggagattccagcttctgcacactctggcatatcctttggcatatgaaatgccatgtgccgcatttggcggcagaccaagtttgataagattcttttccctgttctttggcgttttccagtgtttccatatgcacatgcgcagtcgataccgaatctgtccgtccatttttgcgcacagccttttcatgcttccgattttgaaataatttatccaccctcggataagccggttgagtttcccaattttataaccattgcccactccccagctcctgcttgtatatttcttcatctgcgccttgaactttgctgccgctttcgggtgtggtctggctttgtaccctttggcaaatgagtcatagtaaaatccaaaccccagatacttaatgccctttggtttatcaaccctgctcttttccgcgttcactttcagtccaagcttttcctctataaaccgagccacgctcttcattacccgctctgccgcctgtctgctcccgaccattataataaggtcatctgcataccggacgaaatccagcctccttgcttccagttctttgtccagctcatttaacatgatatttgctaacagcggcgagatatttccaccctgcggtgtgccgactaccgtatcttcatactcatcatcaatcattacgccgctgaccagaatctttcttaccaccgatatgacatctccgtcctttattgtccgtccgaaaatcgtcatcagcttgtcatggtctactgtgtcaaagaatttcgctaggtcgatatccactatccagttgtgtccgtcattcatcatttccaatgctttaaggactgcctgctgtgcacaccgcttgggtctgaatccatagctgtggtcgtgaaactgctcctcaaatatcggggtaagcacctgtgccaccgcctgctgtacaaagcggtctactgctgttggcactccaagatttcttgtaccaccatcgggtttgggtatctccaccctgcggactggcttcggcttatacttcctcgtccgcaactgttccttaatgttttcgccgttttccgaaagatatgcgccaagttcttcaacggtcatcccgtccacgcctgccgctcctttattccttacgacttgcagatacgccgcatttagattatccctgcttaatatctgctccatgagactgcttgtgtccatgcgttgtttcctttctgccccttttgcctttgccgcctttgaagtcatcgacaggcgtatgctccggctacgaagtggaacgtacttcaactgattgattgttcagcccttcgctccgtccccattacaggaacttcctcactactatggcttctgctgacttctcacaattcgttgttactacggctaatgagaccgcctgtgagacctccccagttaaggtgcgtgttcttttcctccatgtacctgccgcatttactcgtacttccggcaaccttttggacttcagtgccttttgccaccttatccgtatttccgagccttatatgcggttcctgtccgtcaggtcagaggtttgcttacagcttctttcagattccgtctcacggcggacacccttgctgttcggctatgtgcttcgttgttgcctacgcgcacttgggactttcacccattagaaaacgcccatgctgggcaaacaaaacagccggaaacaaggggcattcccccgcttccggctgctgttctattcctgctggattttatcctgtccggccttaatccgtccttatttctggatattattcctgattacaccatacaaatcaaaactcaggataccaaacactaatataactccgatgactgccataactgattccttccttccaatatgttccccatcactgtgatagattcattatatgtcaggcagacctgcttagcaatccgcattatatctaatcttttggtgaacacacatctgttttttgtgcatgaatgcaaaatattttagattgactaattttttttgcatctatctctttttgcccatcctggcagctctctgagcaatcagttcccctgttatgctgatggcaatttccgccggtgtctcggctcctatgtctgtgccgataggcatatggcacctttggatttcctccagggagaagccgtccgccagcagcttatccgtcaccacccgtatcttgttcctgcttcccatgatgccgatgtaataaggatgcagagccatggcctgcttctgcacgtaataatcaaactggtgccctctggtcatgacgcacacatagtctctgggacggatatccacataatcgctgatatgttccatatcccccatgacggtcctctctgcctggggaaacacccggggattggcaaatgcctccctgtcatccatgaccacgcatctaaatcccacatgggccagcaccggaaccagctcccgggccacatgaccgcctccgaatatatagacagtccccgcctgtaccaggggctcgatataaaacttacgcccatccacttccttctggagggcattgcttccgaaaagctcctcctccggcagctgtcccagccccttaatcccggccaggcccaggcttcggctgtacaaacccatctgccagcatgtctcgtcggtgatatccagtataagccagctgtcctcatcctttgccagggcatccaggacctggccgcagagaccggacagcgcctggtcgccggggcggatgtactggaaatataccaccacatttccgccgcacaccattccgatatccgccacctggtttctggtaagagtgaatcctttggcaaaggaagccttgtcctccatggccttaagggctgtctgcatagcctggtactccacggcgcctccgcctacggttccttctatggacccgtccttccttaccagcatcctggagccggttcccctgggagtggagccggaactggcaataatggtcaccaggacagcttcctccccctgttccagtaattgtcttaactctgtaaataatgttttcatgactccgtctcttcctccccggaaaaatattttttgtaaagccgttccccctccatgcgcagttccttttccatccgcaggtagcggtccagaaaatccttagacttgggcgtgagctgcgaaaaacctccctccgccccgcctgactgtgtaatcagaagagggtagcctaactgccgctcagcctcctttaaaatcttccatcctttggtataggacatatgcatctgcctgcaggctgtctgcatggagcctgtatggccgatcagagacaggaactgggctgcctgggggccgaaaaatccttcattgcgctccagtgtcagctgtacctggggatatacggccagcttttccctgcccagactgcccagggcgcagtcctcgtccgattccacggccatgataatcccctcatcctccaccggaatttcttccagctgcgcattgatttcaggctggcgcagagcccctctcagtcctctttcaccgtgatatgccaaaagaggcccgatggctgccttggataccaggaccggatggccccgtttcccgtcatatacaggacaggcggccattacccgggaacccatcatccgctgtatggtatcctgaaggaacatgggaaatttggcaggcaggatgaataccctgtcgcataaatcctctatataatttaaccccatgcagatgctgtaatacatctgagtctgctcataatcctgattgcgcaggcagatgacccgcagtccggcaatatgtttttccacctcgtccgccttctgtcccgtgaccacaaccaccggctcgattcccgcccgtttcagtgtgatgatgattctgcgtatgaccgtgctgtcccccacgggaagcatgggctgaaaacggctgattgtgctcttatggcctgctgcgataatgacagcccctgtcctcataagtctgttccgcctttctgataagtattataacggcctgatatatgcctctaaagttctcctgtcaggagcaaaagggcggacggcgccaccctgagccactgtggaaccacccccgccgtatcgtgggtgtggatatccttctccttcttccaccacagaccgttctgtaaagtaatataccactcaaaaggcatttcggaaatacatggggagcatacttttataagatttgcgtcttcccgctccatataagccctggcgccgctctctgacaggggttcaaaatcatgggccctgatgcccacgtatgtgatggcgtcacccacgggacggtccgtggccagctccaggccatcccagtccacggcccgtatcctgcgttcccccagacgttcaatcctggatatgttcttacaccccgtaagcctggctgcctggcatgtgaccggattctggaagatgtcccgtgttcttccggctgccagcacgcatcctctgtccataagcagcagattatcgcagagctgatatgcctcatccctgtcatgggtcaccataatggtcaccccgtcatactccttaagggcgccggccagctccagcctcagcccttccctcaggtatgtatccatggctgaaaacggctcgtctaacagcagcgcctccggctcataggccagactcctggccagggccaccctctgctgctgtccccctgacagttggcccggatagcgtttttccaaaccatgaagccggaaccgttccaccatctcagacaccttttgttccccggcttcccgggacatgggccggcgccttctaagccccacatttccccgtcccccctttaatcccaccatgatgttctgctccacggtcatgcccggaaacagagcatagttctggaacaggtagcccacccgccttacctggggcttctcattgatcttgagggcagagtcatagagaacacggcccccggccgcctccccctgggcatagcgcagggcaatcctgccctcgtccgggcggatgatgccggctatggatttcagtgtcatgcttttgccgcagcccgacggccccaggatgcccaggcatccccgccccgcctcaaagctgatgtccaggctgaaaccctttaatttctttcttatatcaacttccaaatgaagattgtattctgagttcacggctgttcccctttcatcccttccggttcacgggccttaatgccgcccagttcatcaatacaatggacaggaatgcgatgaccacaatcactgccacataccggtacgccgtatccatattgcctgcggccacctcggaatagaccgccatgggaagggtccttgttttgcctgctatatttcccgcaatcatggcagtggccccaaactctcccagtccccttgcaaaggccagtacgcctccgctgacaacccccggcatgcctcctgtcatgagcaccttccagaagatgctccactcgctcatacccagggtcctggctgccgccgccaggttctggtccacctgctcaaacgcgcccctggcagagcggtacatcaaaggaaaggacataaccacggccgcaatcaccgcagctgtccatgaaaatgcaatcttaacgctgaaatattcaataaaaaactgtcctaccggccgttttaccccgaaaatatagagaaggaaaaaaccggccaccgtagggggaaggacaaggggcagcgtaagcacgccgtcccaaatcagcttccatgtttcatttttcatgctcaccacagcccatgccgcaaagattcccagaaaaaacgtaatgaaaatcgacaagctggctgttttcatagatatcagtatcggtgaccagtccatggatggttcctccctttttccttactcgcctttcgtgaatccgtactcctcaaataccttaatggcctcgtccgtcttaaggaattccacaaagttctttgcttcttctgcgtgagccgtgttcttcactaccgccacaggatagatgaccttccccgcaaggctgccctccggagcctcagctaccacttgcacctgatccgccatgccggctgcgtcggtggcgtatacgatacccgcgtcagcgctggacgcggccacctggttaagcacttctgtcacgttggttccaaagcttaccttgtcctgaatcttatcccagatgcctaggctggtaagagcttcctgcgcgtactgtccggcaggcacgctggctgggtctccgagagcaatgctctctgccttctcaatgtcctcaaacttctcaaaacccgcgctgctgcctgcgggaacgatgagcacaatcttattctccagcaggttggtgacggtgtcggattcaatcatgccttcctcgtccagggctgtcatctgcttggtcgcggccgacatgaacacatccgcctccagtccttcctcaatctgcgtctggagcttgcctgagctgtcatacgtacccttgacaatcacgcccggatactgctcctggaacatgggaatcagttcatcctcataggcattcttaaggctggcggcagccgcaaccagaatctccgcggattcgcctgcctgggctgccatagtctccccggccgaagactctgcttctgtctcttcaccggcggcaggtgcctgggttgtctctgccgctgtctttgccgcggtgggggccgccgttgtttcctttgccccgcctgagcagccggtcagggctgctgccgccatcattgccgccatcatcatgcaaatctgttttttcataatttaatcctcctggatttagaatattatttatatacaaacacaggtactcgttatactcaaacgaccatatcgttccccacataaatgcccatctgcaacggatgagcatttataccgggcaagcgcctgtattcctatatcactgttatctgtatctctggagtgtgtctgaatttgcgttcagacccacgttagcttctggcgcattccgaggcgcttcccctgagtatcttaagtccatggtcaagactgcccatgatgaagccaaggctctccttaaccgccctggggcttcccggcaggttcacaatcagggtctttccccggataacggacacgcccctgctgagcatggcccggtccgtcacctccatggacttcatgcggatgaattcggcgattccaggcgcattgcgctcagccactgccatggtggcctcgggagtctggtccctgagggaaaatcccgttcctccgctggtcagcaccagatccacctggcggctgtcggccagacgtataagctgtgtctttaactggaccggctcatccggcaaaagcaaaagctccaccacctcatatccggccgcttccagcaactcctttgccgcgggaccgctctcgtcctttcgctctcccctggcgcccttgtcgctgagagtgatgacggcagccgtaaagggacgttcctccgccggcggctccacccgcatcacatcccctggacggatgattccctcccggacaactctggcaaacactccctccttcggcatgatgcactcacccatccgcttgtagatagcgcagtggctgtggcattcctttcctatctgggtcatctccagctgcacggtgcccgcatacagccttgtacccacgggaaggcttctgaaatcaataccctccaccaccaggttctcgccaaaagccccgtctataacattggccccgcgctcgttgaacgccctcaccttatcataggagagaaggcttacctggcggtgccagcggcctgcgtgggcatctccctcaataccgaaatccaccagaaaatgcccctcttctatggccctcttctcaattccccgtttatcactgatacagatggccttcaccactccggtgggacagacactctgttttgtctgctctgacatatactttatcctccaatagcaatcatgttatgtgcttctgttacctgacccggacgctcgaagcagtgggccgcgggtttgcgtaaaacagcctgttccatggccttcctcagttccctctgaagctccccgtcagacggacagccggcatagggccaccggtaatgcccctcctcctcaggccgttcctgtccttttctaagtatccgcctcaaatccaccccgtcctcatagcacagacagggcttcagatagccctgggaggtaaggcgcacccgattgcagtcgccgcagaattttccgtggatagcgctgatcagtccgatactgcccttaaatcccggtatcctgtagtagacagccggtccgaagccatgaacccggtcatcctcctccatacaggggtatgccttcatcatctcctccagcagctcctggtggttgatggtcttaaaattcctgccgtaaccaatgggcatcatctcaataaaccgcacatccaccggatattcccttgccagctccgccatctgccgccagccatcctgtccggcttcccggtgttcttcatccatctggctgaaatcaatggacactgcattgattttaacagataacggcatggcgcaggcccgcctgacggcttccgtcacagtacccagtgcgtcggttcccgttatcctctgatacagatccctgtccagggtgtcaagactaatgttgatgccgtctatcccggcctccgtcaaatcgtccagataccgctccagcagtacgccgttggtggttatggttaccttctcaatgcccggtgtgctcttaagctgctttaccagctggcagcagtccctgcgcaccaggggttcgccccctgtcaccttgatatggcgtatgccaaggctggcagcgcagattcccacggcccggatctcctccagagacaggatatcccatctgggaacgcactccaccccatagggcatgcagtacttacagcgcaggttgcacctgtccgtaatggatatcctcatatagtcaatggttctacccaatgcatccttcatattgctcatcccctgttccgggcacatctggggttatggaattccccgctcttgcctccgcttttatgttccaggtaaatgtctccgatttccatggacttatccacggccttgcacatatcgtagactgtcagcagcgccacggacactcctgtcagcgcctccatctccacgccggtctttcccgtggtcctggccgtgcagaccgcctcaatctcattgctctccttctttatggtgaaatccacggtaagcttggtgagattcagtatatggcacagaggaatcagctccgaggttcttttggcccccatgatgcctgccactctggcaacccccagcacatctccctttgccatggtcccctgcgccaccttttccaggcactgagggctcataaagatgcttcctctggccactgcctcccgctttgtctcagccttatcccctacatccaccatcagggcgttgccctggtcgtcaaaatgtgtaaattccatgtctgtttcctttcaaacggtttgttacatccccttgccgaacccgcagttggggaaggtgcattccggacagttaaggcaaagcccgccctggcccaacgcggccagatcatccgccgtcacctggtcatccgccatgattctcggcaggaccagatcaaatatggtacgcttggcatacatgacgcaccccggaagtcccatgatggcaaccgtacggggattttccccatccctgacctggtaataggccagcaggaacatggctcccggaagcaccggcgctccgtatgatacgatgtccgctcctgtgttccggatggcaagcggcgtcttgtcgtccgggtccacgctcatgccgcccgtacagacaaccacgtccgcgcccttttgtatcatgtccaggatgctggccgtcaccttggtatcgtcatcgttccacgtcacatggtcaatgacctctgtgtcaaactccgaaagctttccccggatcacaggggtgaaggtatcctggatacggccgtaaaacacctcgttgcccgttgtaacgatacctgcctttttatgtaaaaatggtttcagctccaggatgggacatccccctgttgcctctgcggccgccctttttgccgcctccatcttttcttcctcaatcacaagagggatgattctggtccctgccagcttatcccccttcttcactgcaaaattgccgtgacgggtggctatcatcatctgtccgaatccgtttaccgccttaagcccccggttatccaccttcagaaggccgtcacatgctgccgtcagctcaatctttccttcctttgcctgggaacgctccatattctgccctttgcacatgtcacagagaatctccgccgcatcattctcatgaagcattccatcctccttctcccatacatagagctggtcctttcccacacttaagaggaccggtatgtcttccctggtgaccacatggcccttacggaataccgcatcctttgtcacgcccttaataatctgtgtgatatcatggcacagtacggtgccctccgcatccactgtctgaatcagtttcattctatttaacctccgcccgttatttattttttcaaataacgcattacatatagaatagcaccagcgttcgattttgtaaagatagatacactgcaaaactggaatttatatgggttttcatagtcttttaaggcgaaaatggccgggcgttccatctctgcggcacacctgaccatttccacacccctatgaggtcattcctattgaaatacggaaatgtatcattttagggctttgtttctgtatctgactgtaatcattccagtatctgagactcatataatcctgaggcgtatccgcatccagataaattcccggatcctccacctccagttccgtaatcggcacccccaggcgctccatggctcccttgagccctcccccgcccctgtaggcgcagatatccggcaccagccgtgaatccgcccggaccggatggcccggacggccgccgcagaccgggcgcaccagggcgcccgggcattccatcacctgtttaaaggcggcctgctcaatcagcgggacgtccgcaggcgtgatgaggattcggccgcacagctcggcagccctggatatccccagtttgaccgaatcaaacatctggccggaggcataattttcattgcggacaaacatgatatccaggggccgcagataatccatcagctggtccgctttatatccggccacaatgataaccggagaggcccccgctgtcttaagattttcaatggccctttcccttccttctttgtcttttcgttgaccatggccccgtcgtatctggggtccatgaacgtgcccagtcccacctttgtcagaaggcccgggaatccgcgccccatctccctccaaatctgccccaccactcccagtggaatgttgtaggccagaatcttgttgtccacgatttgctttgtcaccttaaaggaacatcccgcatggccgtgtatgctgcatgaaagcagtccgtcgtgggccagcgcacactctccccggcaggttttgccgtcctcagacatacggccgaaatccccctgacccgccccgtggatatgggtgatgcccgacgggtgtcctgtttccataaatctgttctcaatggcaagccctatttcctccggccagcctgtcattccctggaccgccgaaccgataaccgcgccgtcctgtaccagctctgccgcctctttcactgttatgatttttgccatttctcccggtccgaccaatccggtgcacataagcctcccttcccatggggaaattgtagttcaccaccaggctgacgtcctcaaaatcaattcccctggcagccacatccgcggcaatcaggtaccggaaccctacccgcctgaatgcgtccacatttttaagccgttccttctgctccatctcaccgtgaatcatgccgcagaatatcatggaacgctccgggttttccttcataagaacgcgcttgtcaatgggaaagccgccgaatcacagccggtaccttcagccgttttttccatatatctacatttctttgggaggcagcttttacacatgcccgccttctatatcttcttttacaaacatgatcaggaagctgaccagcagcagcccgcagctgacccatatggtgcgctccctgagatgggccgtaagcacactgcccatgacggctcccaccgcaaatatgccgataactccgtaatagcggatacatttatcgcgatggtccttttggcccgtgtggcggtaccagtacaggttttctgtggcgctgcgcagatttccgatgcacatggtggtggcgtaggggcttcccttgattttcctgaaggcattgacctgaagggcgcatacgaatgaaacaatgatattggccgccatattcatatcctggggcagaaatcccaccacaaaaagaaggatgatttcaatggccacaatcagctgcctccaatgaaatctcctgtcctgccggtgaagccgtttcacatgctccgccatgtacactccgcctgcaaaggccaggacaggagccagataccgcagggccacgttccactccctggcagccaaatggctccccatgagcacgatattgcctgtctgtgcgttggcaaacacatttcccctgcagtaatacgtataagcatcctgaaagcctccggacaaagtcaaaaaaatacccgttgacacagcctccgacatctgtccacgggtacccatactcttttccatctctcctgccgcctttcccaagttaagaatctgattctttcaactcaagattttaccacagttcagactaaattaaaatagttaaatgtttcacagatatatcacgattccccaatctggctggtaatataatccggaatctcctccggacagatatccagggcagtggccagctcaccaaacagcagcttccgggcgctcttgacgccatcccgctcgcggatggacaggggctttccctttcctctgcggtgctgctccatctctgatatctccttaatcatggatgccagttcaacacaatcgccggactcgagaacctgcctgtatacctggggtctttccttgtcgtttgcataccgcttgcacgcaacagacggcagggccagtataaactgctctgcttcctgtctggtcatgatttccctcatctttacctttgggctgtctaccggtatatagatggttgtatcctggtcaaactttggcacaaggctgtaatataccttgtcattattagagaagtcaggtttcaatatgccttccacctggcatacgcctacggttccatagagaatgtattctccttttttaaacaaattcccacctttccgaacagatactgttcaagtgttaacggggtatctgtatagtatatcacacctttccccatttgtaaaatgccggcagccggcaaaaattcctgtgaagagccctgatgccaaaacaacacaaaatcggccccggaaatatgataaactttctcatgtaaagggctggacaattttacaaaattattgtattatgtcattacacagttagttgcaactaaccaaatagacaccacaaaaggaggattttacatgagcgttgtcattatcggaggccatgaccgcatggtaagccaatataaaaagatttgcaggaattacaagtgtaaggcaaaagtatttacccaaatgagcgcaagcctggataaacagattggcagtcctgacctgctggtcctgtttaccaacacagtgtcccacaaaatgatacgctgcgccctggacgaggtgggaagcggcacggagattgtccgctgccataccagcagcggcacagccctcacagaaatcctggaagaaaaatgcgcggtctgtgccgtataggctttccaatcaatacccctgcttcacctccagcatctgtaggccctccaccacggagcccgcgatgcatctggccttgtccgatatggtgaagcagttttcatattcactttttctggggtctatatcagcaatcttaaatccctccactaccggatacccgtcttttatgattcccctcaatagccctgtaagggaagcttccaccgtgacctcgccctgtccggtcacaatgacgccaatggcctggccctgttccaccatatccccaatcagggccttgccaaagaaaatccccttggccggggaatgaatgaccctctcagccccatagccgccgataactccgggaactccggtattgggggctgcgcttccgtttccaatgatgcgccccagattgtggcctctcatggtctctatcacaaggtccacatcctgtccggctgtgaagcccggccccagtccaatggtcttatccgccatatctcttgtggtacccaggtttttctttgccaggatggcatccaccagcgcccagggccgcactttttccagcaccccgcagttctcgtcaatcatgacgggcactgctccctgttccatgatggtgcaggcttcatcgtaaccggaagccttgatgcaggtgattccctccacctcggacgtaccgtcatatactgcttcggaaaaggccacacatctgcggattgccgagggataccccgactccagcaccagcaccgggtatccgcagcggcaaagcttatggatggtaccggtagcaatatcaccgccgcctcttacaattaccagttgttttgtacgttccgtcattttacatccatttccttccatcttatattattcttttgccagctcagcagattgcttcagctcttccacccattcccgggaaaaatgtttttcaaataaccggtccagttcctgccttgtctctgccatgaaggcgtcatatgcctccaacagccggacagcctgaggcgtaagggttgaaccgccaccgtcccttcctccagtctcccgctccgtcagcatgaacccccatgccttttccgactcctttaacatcttccacgctttgctgtaagccatgttcatggtctgagccgccccctgaagggaaccggtggattccactcccctcagcagtgttgacatgccgggtccgaatgccttattttcaaaatataatttcagtgatatcccatagtgaagctgattctggtccaatgatatgcccccctttttctgattggttatatttttcaaagaataacgtcctcaaagataaaagccgggcaaaccattattaaaaggcatctgacattttcagaaacaccctgaagcaatggttgctgccggcttttgattctctgtgcataaagctccaaactgctattctttcactccctttattatagcagatttgtctgattatgcaattcttttttcagactgattccctgccgtttcatgacctctgccagtctctccctctgctccggctccatgggcgtcagcggaaggcgcagatcatccccgcagactcccatcatgcaaagagctgctttcaccggtatggggtttacatcccagaacagggcttccatgatttccagaagcttaagctgcatccgcctgctctccttcacatctccgtccaggtacagacggcacatctgatgtgtctccctgggcatgatatttgccagcaccgacaccacccccttgccgcccagggacatgatggggacggtctggtcatcattgccggaatagatatcaaatccctccccgcacaaagccgctgttttggcaatcagggacaggctgccgctggcctcctttgtcccccgtatattgggatgctccgacagaatcttgtaggtttccggctggatggtcaccccggtacggcttggcacattgtataaaaggatgggtatgcttacatggtccgccacctgggtaaaatggcgcaccagcccatcctgggatgccttattgtaataaggcgtcacctgcagcagggcatctgcccccagctcctgggcctttctggacagctccaccgcatgctccgtacagttgctccccgtacccgcgataacaggaatcctgccgtccacctgccttacggcatagcggatgacagccattttttccttgtcgtccaaagtggccgactccccggtggtaccgttcaccaccacagcgtccgtcccttcccttatcatccattccaaaagccttccaaaggcgtcaaaatcaagatttccatatccgttcatgggcgtcaccactgccgtagcgctgccctcaaaaatactgtgtctcataaacataagtcccccgattcaatcattatactatgaaaatatgacaaactcatctttatggtaccaattatttccttctgtcatatagtgacaatatgaaaccaatctcataaggagcgtatccatgcatcaattcctcatactgggcggagattccaggcatatttgcctgaaccggcttctaagtcagtccggagccaggaccctcttttactatgacagaccctcttcccccttctctctcagagaagccatggaagattcccatatcatcctctgccccgttccttttacaaaggacggtaaaaccatcttctcagaaaacagcctgcccggcctggaaatacaagccctcgcagactgcctgaaaaacacccatatactttttggaggtaatatcccttcctctgtcagggagcgctgtgattccctttccattccctgccatgatttcatgcggatggaggaggtggcatggaggaatgccgtggcaaccgcagagggcgccgtggcagaggccatagccttaagtccggtgaacctttacagaagccgctgcctggtaaccggatacggcagatgcgcctccattctggccgatcggctgaagggcatgggtgccggcgtaaccgtggcaggccgcgatgcctcccggctggtccaggcccattgtctgggatacgatacctgcctgttaaaggaactggaatccgtcataggagagtttgactttatattcaacaccataccgtccctggtactggatggtgccctggtaaaacagcttcaggaaaatgcggctgtcatcgacattgcctccgctccgggaggggtggacttccaggcccttaaacgccggaatatacgggccagattatgccccggacttcccggccgttactccccccattcctctgccatcattctttatgaggccgtcatggagcatatccgggattcacagactcagtaagaaataaggagaacaatatggaattaaaaggaaaacatgtaggcctggccgtcaccgggtctttttgcacctttgcaaagatagaacaggaaatcagacatctgaaggagacaggagccgtcctgcaccccatattctcagggagcgtccagtccacggactcccgttttggggataccggcgagtttatggaccggataacatccatcacggaaatgaagcccatactaaaaatcgaggaggccgaacccattggtccaaaggggtacctggatgtcctactcatcgccccctgcaccggcaacaccctggcaaaactggccaacggaataacggacaccccggtcctcatggccgcgaaagcacatctgcgaaacggcaggcccctggtgatttccgtatccaccaacgatgccctgggcatcaaccttaagaacatcggcctgctgttcaacatgaagaacatctactttgtcccctttggccaggacgacccggtgaaaaagcccacctccatgattgcccgtaccgggctcatagagaacaccctgaaggaggccctggagggcaggcagatacagccggttatacaaggggtgtaagaccctttcacggtaataaaaataaaggtgatcggaatcatactgcttaagtatgaatccgatcctcactgtctgtgggtatccggacaatttaagggacatggctactcaacccttttgctggacgaatgtatcagggacagtaaagaaaaaggaaaaaaaggatttgacaaaataatttcttaacctgacagcgtctaaagacaactatcctgccccatcatctccctgcactgctccaccccgcaatatttccacaaatccttccgggtcatatctcttccctcctggaacccatgccggctccgggcagcgaaccgctgtccgtccaggcttactgcctatgcaatattcctgaaaatgctgttgcttttcctgtctttgcttatgccataatcataggcaaaaaacattggattgtcaatgtgcttttatacgcaccaggtcatcccttaacagcgccctccatcatacccgccttctggaacttctccagaatcaggtacaggatgatgataggtatgataaccagggtggtgcccgccagtataacgggccacggggtggataacccctcgctgaccggcagcagtgaaatcgtcaccatcagcgtgtactttgcctgcttccttaagtacagcagaggccagaagaaatcgttccatctggcaatcagggtgatggctccccatgaggccatggccggcttgataaccgggagaatgattctggtgaagatgccgaagtcagaacatccgtcaatcctggccgcctccaccagttcatccggcacatctgttatgtactggttcatgtaaaagatacccaccgcagtggcaatcctggggattaccaaagaccagaggctgttaatcagtcccaccttcttcatgatgatgaacaaaggcacgcttcccacctccggcggcaccagcatggtggcaatgacaaagtaaaaaaggaatttcctgcccggaaacctgtactttgcaaaggcaaagcctgccagggcacagaaaaacagggaggtaatggttcccatgatggtggtgaacacgctgttaaaggcattctgtccaacaggaatcatttcaaacaggcgcttaaagtttgccatggtgggatttgaaaccatcagggaattgaatcccgtaatgctctcactggcgctctttatggaaatcaggcacatccacacaatgggaaacaggcagataatggtgataaatacaagtacgccgtaaaccaggacagcagacgtatttttctttctgttcatttcattccctccttctatatttcgccctgcttgtgtcttaccacaaactggatgatggatatgacaatcagaataagaatcaggataacgccgattgccgatgcataacccatgttgaatacattaaagcctgactcgtacatgtactggaacagggatgagttggaggttcccggccccggaagaatataggattcattgaacagcttccacatatccactgtcagtgtgacggaacagaaaaacaggatgttctttaaggacggcagggttataaaccagaactgctgccacccgttggccccgtccaccgtggctgcctcatagtaatccttggatatgttaagcagtcctgataagagaatcatggtaaaccatggggtatatctccagacattcaggataatgaccggtatctttgaaaatgtggtgctggtaagccaggggagcctgctgcccccgagcattgtcaccagctcattgaccaggcccacgttttcatcaaacagcattcggaaaataagacccatggcaatggctgcacatatattcggaaggaaggtagccgttttgaaaaatgccctggcggaattactctttaagtatctgctgtttaatagggacgcgatgagcagggcacagcagataatgaataccagtccggtgagccagtagaccactgtgttgcccagggattcccagaacatatcgtcaatcagcattttcctgtagttgtcaaacccgcagaaatccggagtcccgattcccttccagtttgtcaggctgatgtagaacgtccatatggtgggcaccagctgaaatacaagaaacaggataaaaaagggcatgataaacaaatagggagccctgtattttttcagtgcttttaacattcgctgcctcctccttaagttttataaaaggctccctcctcggggcgggagccttttcatgcattactggctgatttcagccttgccgatcttagcttttaagttcttatccatgttggcgatggcgtcgctcatggactggttgcctgccacgtacttctccagctcggcagaaatgatttcatctgcctccgcatcctgaggtgtcaccaccaggtttgccgcgccgttctccaggcacttgccctccatctcgcggaaggactggccgccgtagaagtcagatggctctttccagaacgggtcttccagcatttccctggatacagggttggaatatggcgcgttctgttcttccatggaattcacccatacttcctttgcctgtgtgtcaaaggtgaaatcataccacatctggcggaacagctctgagtaaggattgtcgcccttctcgatgatggccatgtactgggatacaggagcgcctgccttgccaacgccttcaaactcaggagcggacatgactctccactgtcccttggtggcttcgcagttctttctcatgaactcatcccagaaagcgccgatgcagaacgtggctacctgctgtttgttgatggcgtcgtagagagccggttccatgatggttgtctttaacagcaatccctcggaattcatggtgtccagggcgcccaatgccttctgcgtcccttcgtcgcttccgattacaacttcgccgctctcatcccagattttagcgcctgccgacggcataagtcctctgcggccccagtatctccaggtcttgctggttggatcaatgtaggaaaggtaaacttccccgttactcttttcctttagctggcgtcctgcctctatgtagccttccatggtcttcatctgctccgcgtccacgccgtacttgtcaaaaatctcctggttgtaaaacagcacctggggccttacggaatccggcagcgcgtaaatgcgtccgccgatggtggcgtctgtggcggctccgtctaccatcttatccagtagaggagtcagatattccgtctcatcctttaagaggcctgcacctgccaaatccatgatggttacagggtccagcatagctgcgtcgggaaggtcctcggtggctcccgacaatgctgtcatggtaatcttctcgcggatgtccgcggttccctctgtctggacaaactcaatcttcacgtccggcgcaatatccttgtggtcctccagccatgtctcaaaccactgctgcctgtactgcgggtttcccatggcatacaccaccagggttcccgcgggatatacggtcttttcaccgtccgctgcctcagcgccctcagccgtcccgctctggccgccctgggcgttctctgccttggatgccgcggtggtgcctgcctggtcggtcttgccgccgcaggccgcaagagagcccaccaccatggataccgcaagtgccattgctaactttctgttcatcattctctgttcctccttttgatattcgctgttacattattccctggctgcctctacggctgcctttaaaaggtccatatcctgttctgtggcaagggtgcagtcagctcccaaaatgaaatgggttcttccgaagtcctcaatcaccttccttgtctcttccttcactgcctctgccggtccgtccaccagtacgccgtgacggttcggcaggccgcccatgatggtttttcccgcaaacatcttccgtccgtcctctaaactgaacggcgcttcgtatacgccccagttcaccacgtccgcgtaggggccgtaatccttatagcggtccatgttcagctgatccttgcagatgtggaggaagcagtagcctcccgcgtccttgatggccttcataatctgcaggtcaaagggcttaatccatttatcaaattcctcatccgtgaagaaccgtgtttcgccgcccagggccgcataatacacgccgtccacgcccagttcaatgtatgtcccggccagttcacacatcacgtccgcaatacgcttcatccctgccagtaccgtatcctcatcctcatgtaaaaggcggcagagcttctcccttacctgatcgtatgtatagttggggtccatcttctccaggggatggatggctgacgccgtaatgccgtgaagggtacccaggataaatgcgtccctgccgcatccggccagaatcttcttaaccagctccacctggtcctgcatgaagccgtcctccatggtcatctcttttaccatgctgtaatcggatccatggttaatctctcccatatagggaaccaggttctcattcatgattttaagaatgtccgtatctgattcctcaaaaaatttcagatgagcttttacggctgcgtctccaaaagctgattccttaggaaaatgcagggaaaaaccgctgggtatcttgtcaacctcttctccccggatggctgctgtcactctctctttttttgtcatagctgtctcctccgttaatcacattactgatattattagtaatcttactaatcgtgattataacactatcgaccggccatgtcaaataatttttatccatttatataaaatattttcgccatacagcattatttttgtttattttcacacagtgttagatttttacttcaaaaaaaggatgtaaaattgacgtcatcaatcttacatccttaacatttatgcattttcccgtatcccgcggcctgctctcaaagagaataattctcctgaatctgctcttttacattcagtatatccttctggagcatttcaatggcccgctccgtatcacgtttttccagggcctcaatgatttccctgtggtaaaagctgttggattcggcattcttcttccaggctgtctggaaatattgggaaatatacgagcaggatttttgaagggccgcggcaatcacatcgcatatgtaactgtttccacccatctcacagagctttaaatgaaaatccgtgttccggttccaatggatggccaccatcctctcgtggttatcctttgtgatggtgtccagctgtcttaaatgttctatctgctcaggggtaatcctctggcacagccgcctcaggttgcctgtctccacatcaattctgaactccagaagatccagtatctccttcaaggtcaccggaaccacctgatagcccacccttggtatacttttcagtacattatccttgcacagctcaataagggcctcccgcaccggcgatttgctcatggcatacttttccatgatttccccttcatggatgatatcgttaggcttatagataccttcttctatctcccggtagattccctccaccacggtttctttcagggtcttctttgttttcatcatcttttctccaatgccttcccttttttgtaaacccgttttccatccttttacaagtacatcttaagattataatccgaaatgcaccgggattcaataggtggattataaaaacagctcattttcccgtctgatatccctgacagaagaaagcttctgctccagcatggcgcaggcctgctcaggcaggcttctggccttcaccggacagacggaaatgcagcgcatacagaggatgcagcgggactggtccgttgaggaaggattgctcacaggaatggcctgtacaggacatctggcagcgcacagcccgcaggatatgcaggatgcgttggtaagcggaatcaccggcatctgcttccagtcacggtaaggacagtttccgggaacctggggctcctgccagccgtccccttccagcttttccagaattttggccgcaaagtcagccatttccttctggtccctgccgtccggccggcctgccgcaacgtcccggaccatggagtgttctgccagcagcgctgtccctgccccaatcctgaatccctgcgcctttaagcagtcgtccagttccagcagggcgtcctcaaaggccctgttgccgtagacagccgccgtcactgccgctgccccgccgcctctcagatatgtaagcttctccgccgcatatccgggtatcctgccgccgaacacaggcacacccacaattacggtatcctccggtccaaaggaatactctccctccaggctgcaaaggtccacatcctttaccttcttccccatctccatggccaggctgagacaggcttttctggttccgcctgtggggctgaaatacacaacggttatatgttccatcttattcatgctgttacctccggaattttgtatattcattcgatattctagttattttatcacattatgagcggaaaagcatcacgtatctgccgtttaccggagcccaggcatgtccatgaggacatcagtatactagattttttacaacgatatacccgtctttgatttttcgttcctgcatgaacctttacatggccgcgcattgtcaatacaatactataactatagcttattttttgataattcgtaagcaacatcaacaatcatatcttcctgtcccccaaccatgccgcggcgtcccagttctataaggatatctttgatatctataccaaaccggtctgcggcccggcgcgcgtgaagaaggaagcttgaatagacccctgcataccccagcataagggaatctgtgcggattacctgcggacggcgcatcagcggctccactgctgtcgaagccacatccatcatctgatagatatccgcattaatatcataacccatacggttaagaaccgtacacaacacctcaatctgggtgttccccgcgccggctcccagtcccctgcatgtgccatcaatatattctgcacccgcctcaagggcagccagactgttgcccatagccagccccatgttgttatgagcgtgaaatccgatggggacacttactgactcctttaatgctgagatacgcctgcgtacatcatccggaaccatatacccggcggaatctgccaaattaatataatcaaccccttccgcctcaaaaattcttgcctgctccacaatcttgtccggttccgccatatgggacatcatcaggaatcctgcaacaaacaggcccttgcctttggcataccgtatatgctgaatcgatacatccgcctctgtaacatgggttgccactctcactgccctgattcctgtatcctccgcccgtttcaaatcctctatcgtgcccacgcccggcagaagcagcacggtaagcttggcatttttaatcacctcactggccgcacgcagcaatgtcagttcatcgacggcagaaaacccgtaattaatggatgaaccgccaattccatccccatggctcagctctataaaatccactccggccctgtctaacccgccagctatcgccttcacctgttcaactgtaaaactatggcttacggcatggctgccatcccgcagggttgtatctattaaattaatccttcttccactcatgccatctcttcctttccattcagcagtctggccgccaccttttcagccgttgccacagccgcctggttaataatatccagattaccggaataggccggaagaaaatctcccgcaccttccacttctacaataaccgtaaccttatttccgtcaataaccggaggcacgcgcagacggtagcccggaacataactttttacttcttttacaattgcttctactgattcccttattcttgctacatccggagtcttaaccagtgcatatattgtgttggtcatcattaacggaggattagctggatttaatacaataatagcctttcctttatccgaccccgccactatctccagcgccctggacgtagtctccgtgaattcatctatattggccctggttcctggcccggcacttttagatgaaagtgctgacacaatctcggtatactctgaatcagctgcacgattaatcgcataagcgataggaaccgcggcctgtccaccacaggtcaccatgttaaagttatctgtatcagatggcaggctgtccagattaacacatggcaccacatagggaccaactgcagccggtgtcatatccataacaatttttcccgcctgcttcaaaataggcgcgttatgtaaatgtgcttttgcactggttgcatcaaaaacaattcggatttcatcatcagcagccactgcatccacgcctctaatcgaagtttcaaaccccagtcccgcagcccgctttatcccctcagactccacaataccggccatcagcttcatttccaggttgctgctcttcattatcttatacatcagatcggttcctatattacctggaccgatgatacctgcttttatttttttcacagaaaatgcctcctaaaattaaaatgtaaatcctaatacaccgtagacaaatgttgccacaaccgtcatacccaatccaatcagcgactcatacggaataatcttaagcctttctttgattgacagctgcagcgttcctgcactgatatggaagaagctgccatggggaagacagtcaaatacacagcagcctgcatgaatcattactgcggcctggaccgccgtcacctctaaggaaaggatggttgggccgaatacctgggatgccacggtagctcctgctacacaggatgcggtagccccacccataacaataccagacaacggcgccaggatatatccggggactccggatacctccacaaggttaatcagtgtatctttcagtccggaattagagataatacctgatatggttcctgttcccaaaagaagcaatacaatgccgctcattctctgaatacccgtattggcgtacttcaacatctccttgggctttctgatagcgatggcgccaatcactcctcctatgggcagagctacaataggatccatggtaatattgcagattggacggagcatcagcagaataattgtgcaaaagggtccggccagcgcacggccaatggaaggaagctgcttcatctcaataaccgcactattgacaggcttggaacccaccatttcacccttattcttaagtactgtcataaatatatatgtaaatgcaattccagctaatgcaggaatcattccccccagcacaacagaggtcatgggaatacccagattctctgataaggcaatggtattcggattaggagaaataatattaccggcatggatacctccaatcagggcaatagtcgcagccgccctagagtatctggtagaagcagcgatatccagggcaatgggagccacaattaccactaccacatctccaaaggttcctaccgcctgaaggacccatgcagaaagaatgattgccagaagagcaaaacgactgcccatctttacaacaatcgtatgagcaatggtttccgccgaaccagattcaatcaggaatccggccagcatcccggctgcaatgatacgcaggataccggacgccatgccgcttccgccggacaccatcaggccgactgtttctgacagtcctgcccctccaatcagtccgcctgccaatgcgcccagcatcatgccatataccggcgggaccttcaaaataattaatataattgctattacaagtccggcggcagcgcctaatgtacttattgttgccataatatacccccgtcatattgtctatctgatcaacactgaattaccgcacctttgtctgcggaagaagccactttggaataaagccttaaataaccattcggaatctctttttccggttttacccaatgttttctgcgctcactgatgacctcatccgggacatggagttcaagctttccatctataacatcaatcaggatctcatctccgtcctctacaagggccagcggaccgccttctgctgcttccggcgagatatgccctacaaagcatccgttatttgtcccggaaaaacgtccgtccgtaataagggccgtatccattgccaatcccatgccataaatatacttcatggccttaaacatctctctcattccggggcctcctttgggtccctcgtatcgaataaccacaacctcccccttccggatcacaccacccagaatcgctgtttccgcttcttcctctgaattaaagcatctggcctttcccgtaaaacggtggagaggaggagcaatagcacccggtttagagattgctgtatcaggcgccagatttcctgataatacggcaacaccgcctgttacggagaatggatcatccactgtcttaatgatttcacggttctccggataccagtacacctgctttttaaggttttcatccacagactccccggtacatgtgacggcgctgcggtcaataatatcagccagatgatccattacccgcgagattccgcctgcgcggtaaaatgcttccatatcccacttcgctgccggattcactttcgcaatctgaggtgttgtcagattcagctttctgaactcctccaccacgttcatatccagttccgcctcattggcaatggctgcaatatgaagtacagcattggtagacccgcagatcgccatagttactttaatagcattgcgaatagactcctctgtgataacctttcttgccgtaatgttgttcattaccagtttcacaatagcgcgtccggattcaaaagaagacttcaggcgttccccataaggagccggtatcagggcgcttccaggcaggctcatacccattgcttccgacacacagcacatggaatttgcagtgcccaggaatgagcaggacccacaccccggacatgccgtattctcaagtgcgcggtattcttcctctgtaatcttcccggaacgggtcatgccctttgcctcatcaatggatgtcaggtctgatttcctgccatcaaattcgattccccccagcatgggaccgccaacgcatacaatagccggaatatccagacgcgccgcagccataagcataccgggaactattttatcgcaggaagccagaagaacaatgccatcaagccggtgggcctgcaccataacctcaatggaattacagataatttcccttgatggaagaatataattcatgcctatatgcccctgcgccactccatcacagcagccaattgttccgaactctaccgcagttccccccgcactgtaaattcccttttttacaaactcattcacctgattcagattaaaatgtccaggaacgcaggtattccatgtattggaaatacctataagcggcttgtgatccagttcataatcagaataccccatagacttaaagagagagcggtaaaagggactatcctcaccatgcataatttcattgcttctaaattccatgcatatcctccttataaagatgttttttgttctatattatagaactttattctatattgtaatagtatattgtttttataattacgtcaatgacaattaaacacaaaattacaaatcatttttgtacatgttgtataagttaaaaaataaaacggttgaattattctgcttaagatgataaattactatttagataacaggaggtatattatggcaacaacaaaaatcatccaatctttagagcgcgccatgtccattttggaactttttcagaacagtgtggtagaattaagcttaaaggacatttccgagaagttggaattaaataaaagtaccacctttggccttgtgaacagtcttgcggcactgggctatcttttacagaacgaagataatcaaaggtactgccttgggcctaagatattgtgtctcaccaatgcgcttaaaatgaataatgtcctgatacggattgcacatccttttcttgaacagctctctcacaaatatcatgaaacggtacacagtgcagtacagtccgataacagcgtcatttacctggataaagtagaatcggactcatctatttttatcaacactcaaatgggtgttaaaaactacatgtattgtaccggcgtaggcaaatgccttttgtcttacaaaacagaagcacaaattgaccaaatcctttccttccccctcaaggcaaagacatacaatacaatcacccggagagaagcgctattaaacgagctgaagctaagccgggagcgcggatattctatggataacgaagaaattgaaattggtctcacatgtgtgggtttccctgtttttaaaggttttgaagatcctggctttgccatcagtatatccggagcaaccggcagaattctggacaaattacatagtacagatctgatccacgacatgcaggctgctgccgcagcaatgtcatggcagatctataattatcagcttcctgatgtcaacctatgaaatgtagaatacagaggtgtatcgaatgcccggctaccatgaacagcaggatataaaatcaggtcctttcccactgcccgcctcaaggcaggcgaccacccgagaaagctgctcgtaaggcagttcgcttctggtgtcgtccagaatcttcttttcagatatcaacccgttgacgatagaaatcatggaccattcgccagctctacatcacaggccagacagcacagttccagaaaggcataggctttgcccaccgtctcaaagccgttgaagctcctgtcaaaccggagcatatagtcataggctttcagctccaggcagttcactgtccggttcgcctcgcagacctcgaaaatgcccaccggcacttcctcataagagccgtccgcaagctgcaggtggtaggacagttccaccttcgcgtccttcagcgtgtaccggtcgatcttagagtacaaataaatacccatctcggcggcatacaccgtccccagctcgatcttccgaactgccgcagcactgcgccgtgacatacccgctccccttcacgatatcgtcataggtgaacggatactccactcccgccttcgtcgtgatcttccccgtccagtaaaagtttcgggtgttctcctgcaccgcctgcaggaattccccttgcgaatatcttcttcattctttttcagctcaatttcccagagccgcaagcggttcagaatgctgaatgcttgcttaaccgccataccgctatctcccgatgcagccacccccaatgtagtgggcatcagcataccattccgaaacggtatgggaacgaccatgcttttaagcgcatcgtggacatcacaaagtccatcaaaacacctcgaatccagttggtttaggaatcgtcttctatctgctgcatcactaattgtccatttttaatatccacatattcttctgaaacccgaaaatccttcgggtattctatttttgctattacatatgatgccgcaaattccaatataagaatgaccaccgttgcaagaacgacatatcccaagatacatatagatggtactgttgatggttctgcgaaaatagaacaaatatagccgattgcaatatccagaaaggcgcagatattttgtggttcagcgttgtcaattcctcttgccgtaaggctatagtctcttccactttatccagagtagcagcaattcttcgctgttcatttatcggggggaggcttatcggaaactcactcaaaatagaaaacttgaggttgtcccgcacactgccagttgtatatgaccttataattctttcactgacatcgaacactacatatagcggactgactataactctatcctcacaactttgccaatcgacagaacccacgttgattctggaggggttatatgcaaagaagccccgaggcccaattttgtatgtagtcttatctttgctcgccacttctttgctgaaatatccggtgcaaaatccctgctcattcgttacactgttaactgggatgttttctccgtttttgttgcgttcagaatactctgtaatgacagatccgagtttaattatcatagcatcccccctcagttctatcaacctcttctggatctcagtttccaaggtatccaatttgtccagaatttctgccgtagaggggtactctaccgtcacatactccgtctttttatacttgtttatggacaagtcatatccattatctacgatttcctgtttcggcacaaagaagctctgttcagtgcgcattacgattattaaaccttgcaataatatccgaaatgtcattctccctgatatacagaacgcttatcgtccagactgtagccgtctgccttcatgtcatagaaccagacatcctctccaccaactcacggcggatcgcctgacgcgccttagaggaaccaaagagaacgccatcgggaacaatacaagcgcagcgaccgcccactttcagcatcttagtgaatagcgctacaaagagcaattctgtctttctggttttgcacagtgccagcagatccttactgatttcctcttggaatacactgccggtaaatggcgggtttgccatgataagggaatactggtcacgctcggtgttctcgccggaaagggagtcctgataggtgatgtgcggatcctcaacgccgtggagcatcatattcatagctaatccgcagcctggactggtcggtatcaaagccggagagcagaccggacttgaagtaacgcatattgtcggtcttcatcagttcctttttctgattctcgctgatataggctgcgctgaatggagtccttgagagcgggcttcatcagcgccaccatcatattgatgatgtgccggtgtgtacggaactggccgttttcaccggcagcggcaattttaccgagaaggtactcgtaaacatcgcccataatatccttgttgttcatatccatggcatcaatgccatcaacaaccttggcaagcacctttgccgtagggatcagaaacacagtgtctttcatatagcggctgaaagcagtatccttgccttcaccgatggttctgatgagaaacacataggtttggatattggtcagcatctggccaggttcaaagttgtgaaacacattccagcgaaggtttttatattctgtttccacacgggggctctcgctgatcacacaaatcctggaacaccttgcttttctgcggaacacccagcagattggcattagcctccgctttcagctgattgtcatccaacagcttcataaacatcaaataggtgatttgctccagaacagtaatgggactggtaatacctccagtccatatggtgtcccaattgttttttacttgtttttctgctccaatgccagcccaatcaaccgatctgcatggtctgccatgaacagtggaatattcagtacatcatcgtccatcttcagattatccagagagaaccgtacacggagcttcacttgatctgggaacaactccttgaatttcttgagactcttgctggtggtgttggtctcggatttgacctctacagggaaaatgtcattttctctctgaatgaggaaatctacctcgtaaggaggattgttctggctccagtatcggggaatcacttcaaactgcgtgattaaggtctgaagcacaaagtcctcggtaagagcgcctttgaattccgtgaacaggcggttgccttcaccaaaggctgtaggagccagctgcgccagacggcggagtagacccacatccaccagataaatcttaaaggcagaaaggtcatcgtaggcagccacaggcaggccgggagcggagctgcggtagattttgtgcaccagacgggaatctaccagccactgcagggcatcttcgtattcacgggctcttgcgccctctttgacaactttgtagataaacttcttgttttctcttgccagctgagacggtatggatttccaaatcatagagatcttcgggaactcactgatattgggatgcttggcaaaatcccgctcgtaggtgccaatgatcccggacagggcttcctgcatggcagctacatcccgtgcctccgtccacatcagaacggattcgggcataccgccggtcacatagtacatcttgagtttttcataaagaggattaaagaaagcatcggggatcggctcaatggtgtcaacagtctccaaatacttcgccaaattctcatcaccgttggcgagcaggaactctataaaggtcataggatcgatctgcatgaagttgaccttgcccacagggaaagacgaaggtttcgccagggcaattcccaacagagaaccggcacaggcaatgtgatactgcggcgcattctcgcagaaatacttcatggagttgatgaccttggggcagtcctgtacctcatcgaagatgatgagtgtcttttccggtataatcttctgaccgctggccagcatcagattctgcaaaatccgatctacatccttggtggtttcaaagaactgcttatattcctcattttcatcaaagttaaaataggcggtattttcataatagcgtctgccaaattctttaagaatccaggtcttgcccacctggcgcacgccttttaatatcagaggcttgcggtagggtgaattcttccaatccagcagcttattcaaaatcaatcgttccatagatacactccttcacacttttattggagttttcgtggttccaaatcatatttttattatatgctaatcgttttgaaattacaaccaaaatcacaaagttattgagattttagggacttctatcacatttttctaggaagggagcggcatctcggaaatataaaactctcatttatcaccgttatattagttttaaacagcctctcttcccatatacaacaaagtcccgtctgcttttttcgagaatttggcaaaaaattcatcataagcaatccagctttcccttgggtaattggcatgggactatacataatatacgactttacaacttttaagaaaaaaatatcgtacaggacactttggtgtataattagtttgccaacaaaatatacaaaggaaagtgaccctgtacgacaaactcattatacaacgaaaagaacctgtttggtagacttcaacaatatttttccatctatatttaaaacgttttcttcccctgccgcggagactttatttctactggctttatccatacttgccatggagtcggcggattccatccgttccctctaccgacattttttgtctggcatcacccaaaagtcactgactgctttttattatgcctgttcctactccaaagcagactattccagattcatgaatgtaatggcatccctggctttaaaactcattcctgaagaactccgcatcttttttcttaaggaccattcccttcttaactgcctgtttcattcggtcagggatgtcatcctgcgtatgttcttcaagcttaacaagtccaaaaactttaattctggctttatctgcgtcccgcataccttcgggagggatttgaaatggaatcctcacatccatgccctgatttcccaaggcggggctggtaacttcactgcctggcgccctcatactcactttgattatcgcttcctgcgcctgtccgtaaagtccttttggagcagctctcccttaaacttggaccgtcttttaagaaacttaaaaaccagatttacaaagaccatcccgatgggttttatgtcagggccaaacccaatccgcgctcccctgatatcactattaaatatatcagcagatatctgggccggcccgtcattgccacttccaggattgatgcctatgatgggacttctgtgacatccactatcagcgccatgaggaccatgaaactgtgaccgaatgcatccccgccattgactttatcaaacgcctgattgtacatatccctgacagacactttaaaatggtccgctgctatgggatttatgcaaagcaccataaacaggaaaaaaatctccggaaatgtttatcccctcagaagcagcgttatctttccaggcttctggattggcgtaattcaatccttctggctcttggctatgatccgctcagatgcccggagtgtggcacttctatgttggttttagaagtttaccacaaaaaaactgcactgtttgaacgctatcgaaaggctatgggatatggatagctccatacgccttattctttctctaccgtcagatagtgcagcctaaaccaaaaacaaaaaactacataggcaacgtcatggcgaagttacatcttcgcttttttgctatgccattttttatttcaagtctattatacactatcttggccgatttgcgaagtttcctgaaaaggaacaaatgggggctgtgaaaaaatagagtagacggactctatttcccacagccccctcactttttgatccggaggtctgttacttccctaaaaaagcatatacctcccccttacccccatgaaaagcgggccttccttctttatgccgcaatggcagctcttttccttttgtttctgaatttatagagattatgccctatggagaccaaatatatttccaaactcactcgctttagctttcttcttaccacacgtttgtaccatcggtcatactttatgattccaaatgtcccttccgcctggattgaacggttcatccgcagcagtgctccatggatactttccaggttttccactacttcctggtacatacagctcagctcccggttcacacacaccatccggttcttgtctggctttttacattgttccttatacggacatccgccgcagtcctcacacgtatagtattcttcctgacgtccataccggttccctttcaccgctttcctgtatgcaaaacggaacttctttccccatggacatatcagggtcccatccggacccggcttaaagttcaccgcacggaacggattctcatgatattctttctcttttgtctcttttttgtacatcgggaatttcatgtacttttccatcccgtgttcctgacaataaatataattgttgtacgaaccgtatcccgcatcagctaccggatatttcggataaaatccatacagctccctgaatttctccatcagcggcacaaagcagtccatatccgaccggtactgcttcacatcgatgaccgctatatattcatccgctgccccaatctgaatgttatatgccgggagcagctggtcgtttcccatgtagtcctttttcatccgcataaacgtggcatcatggtccgctttggaatagctgttgcgttccgggccgcagatccggatctttttcacatattctttcagcttttgtgtgtattctttcagcttctcgtaatatctctgctccctgctcttgcgatggcctctgccgtggacgaacgcctcctcgtcgatccggcactgaaaagcgtatcgtccaagaatcatctccagaccctgcggagtatattctgtgttcgtctcaaccttcagtccggtataggccaggtcctcattgatctgatccagcagctgtgtgattttcgcaaacagccggtatctggatttctccgttgcttttttccatacccagctgtatttgttcgcatttgcctcaaattttgagccgtctatataaagatgttccagatccacggcgtctttttttcggatatactccataacggcacggaaaatatcttcggcctttccgtcgatttcattattaataaagtatccgaaggagcggtaaccgggtgtttcgtaatccatcaggtacatataacggatattggttctgcaccggtcctccaattcccttaaacttgcgtatcctgtgtccataaagccgaataagattgttttaagcatattgacccgattatatcccggcctgccatacggtataatggttccggcctgagatactgttctattccgatctcctccatgatctggtcaaataccaataccggatcgcagatatccagactatctgcaagaaatactggaaatcttccctgctttggactataataagacatggtattatttttcatgacagataaattataccaacaaaaaaagaacgtttccagggtaaaacctgaaaatgttctttttttgttaaggggcttttttcacagccccttttatgagcatttagtaatggaaatcaaattgagggttatacttattccagacatgctgagtgaaaatcgatagggctttcatgctggatcaggctctgtggcgaactcaaaacaagcgttcctgctatgtgtaaggcttaaagcagctccactgtgcaaccgaaaggaggcagtgtcttattctggaaatgtacctcgtggtcattatggttgatgagcatgcgaaccttctgctccgcactaccccggatcataatctctaccccgtcctcggagggagttgtctcaatctggttgtcggccaatatggtacccattagcttggcagtggtaccctcatctaaggcacagccaaggtagtacactgttcccgcgccctgttttctccgagtgacagcggcaaatttggtgtagaaggtgtccgcgtagcgatatagcacctcagcatcccgggcttccaacatgtcccggaagataccgccgaagccctggctgccggcgaatgctccctggccttccacagggaaggcgttcaggtcctgaagactctcggtttctgtaaccgttaccccggtcagcccagtgtagcctacggggacaatttcaccgacggggatattgttatcggcatctttcaccgcattccgataggtgaggaccagggtgccgccattctggacgaaagcttccgccttagtccggaactccggcttcgtaataatcagctggggcagtaagacaaccttgtagccagacaaatctgcctctgccgggataacgtccaccgggatattgccatcataaaaggccttatacagctttttcatctcccctgcgcaatccagcagaatactctggcgctgaatacggaagctggccagggagtcatagtcatagacgatggccacgtcactgtgaatgggggcgtccatggcctgggcatattggctgatatcccggaagaagctctggacctcgtagaatttccgccccttcacattgtccgcatccaacacaccgtagcagaactgctcggcccccttggtagctccccggtagcggaagtacatcatggagttgcatccatgggccatgccctggtaagaccacatctttgcctggttgggccggggaaggaaaccggtaacatcgtggccctgggcacccataatggcctcggtgatccagaagttctttctgctcagaccccggatatagtccagaccaaaggcgatctcgtggggaggaatcggcaccttctgcccaccccagacggggtaattgttgtaagctacgacatccaggctcttggccacctgggagtagtccacatgcttatccaggccgccgccggggaaatcgtgcatgaccacagcttggggatccacctcatggaccaggtgggcctggaagtccatgaaacggcaaatgctcagacttcggaaccgttcccagtccagccgcagggcagggttgtgagtggtgatggtctcagcggggagaggaatttcttcaaagctgttgtactcctgagaccagaaggtggtgccataagtatcgttcagcttgtcaatgtctcccccaaatttttcgctcaggaaactctgaaacgccttttggcattggggacaccagcacaaatcgctcccttcgtggccgatctcgttgtcaatctgccaggccacaatctgcttttcacctctgtaatggcccacaagggcgcgaatgattttctcagaatactcatacatctccgggctgttaaagcagtagacgtgacgtccgccgaacgtccgcttctgtccgttctcaaattgagagagaatactggggtgctttttcgccagccaggcagggatggtagcggtgggtgtgcccatgatcaccttcagacccttttctttggccttggcgatgacgccgtcaaagaaggagaagtcatattgcccctcaaccttctccatcagatgccaggaaaactcagcgatccggatcacatttccgcccatttcccggatggtgtccatgtcagcctccatcagggcggggtcccactgctcagggtagtagtcaactcctaaccacatgtgtttactgctcctttcttgcccgcagctcgcggaccatcttattgtagaactcacccgtcagcttgtagccgctcttatagaacacatagcacagagcggacagaatcgcggggataatgatcataataaccttcaggcccatgatggtgcccgcgccgggcgtaacgcctgctttccagccgatgagagtcaggccgatgccgctgacgaaaccggagaacgcgccggcgaatttcacaatgaaggtctgcatggaaaacaggatcgactcgttccgagtgcccagggagtactcgccgtaatccaccacgtcggccagcatgaccgtaataaagaccagcataaagccgatgccgtagttaaccaccgcggaggagacgcccacagcggcgatgctggagggagcgacgatgcccacaacgaacagcagcaggaagccggccaccggcaggaagcaagccaggaagaacgcctttccgcggccaatgaacttggtaaccatggggaatgtgaactgagcggccatctgggcaataccggccacgccagtgtaaacggggtacagagcctcaatgccaatcgcgtagctgaagtagtacagggaaaaggagttggacaactgataggaaaaattgaagaacagcgcaatgcccagaatgaccttcacctggtcgttggcgatgaggacatgcagcatgcccttggcagtggttttctccgcgctcttcgtgacaactttctctttgcagtttatcacagtgatggcggaacatacaacaaaaatcacactgaccatcatggcgaaataggcaaaaccaattttacggtcgccgccgccagccgtgtcgataatttttaagccgaaggaacctacgatcagccaagcaaaagaggcgaacagacgggggatcgcggacacctgactgcgctcattttcatcgtccgtcagggcgggaaccatggaccagtaggggatatcatcaatggtataggtcatgccccacagaatgtacagtacagcgcagaaggccaggaaggtgttgccctcaaagtctacgttccagaacatcagggccaggacaatggcgttaagtacagtgccgatcatgatccaggggcggaatttgccccatttgctccgggtattgtccaccaccatgcccataaaggggtcgttaaaagcgtcccagattcgggccaccataaacagggtgcccacaaaggcgggagcgacaaagcgcacatcggtcagatagaacatgaacaggttgccaaccaaagcatagaccaggtccttgccaaaggcaccgacgccaaagctgagctttgagcgccaagacagtttttccagctgctgcataacttacctccataaatttatagtattttttcgccaagcgctctttttacggtgggccctcccgtgaaaagtcgttctttgaagtgcaggtaaactttactccaatatttactaaaagtcaatagattatacaaatatattttactaaatattttactttcgtgaaaagtgcacaaaaattagggtgtatttttgacatctaaagccaggccatgtaggaagaacgttctcttgatcttgaaatttctgctgtcaacccccccaatactatcaggacttgttcttattactctggcaattaaaaaatcgcaaactccggcatgagaactattgaaatttcagcgtttccgggcatcatcattttggaaaagtacgattatctaattgccggagtaataaaccgactgcaatccggttggccgctccgcacttgactttttgtaaaaaagcagtaaaataaagtaaataattagctgtaaagacaaggagtgagacacgatgaccaccttgaaggatattgctcaaattgccggtgtagcccagggtacggtctcccgtattttgaatcaggatccaaccttgtgcgtcactggtgagacgcgagaacgagttatgcgtatcacagaatccctgggctataaaaaaaacacactccggaccgcatcgtcagctccaacagagcaggagaagcggatcggcgttgtgcaaatgtttgatatggaggagctgcgggaggatatctactaccttgccctgaaaaatatcctggatgaggaatgcttctcccggcagtggattacagtccccctctaccgggatgagcggcgtcgttttgtccggcgggatcaggcgcctctggatggcttgtttgccatagggcgcttcacacagaaagaagtggccagcttccacgagtatacggacaacatcgtttttttggactcggatccggagcctatgcggtattatagtattttacccaactatcatctggcagtccagctggcactgaagcatctgcggataaacggccatcaactgattgcctatctgggcggcgtcaacaccttcggcgaccacaaagagctgacgatggacccccgtttttactattaccgggccagtcaggctaaccgggacagttatgacccatcgctggtgttggactgtgaaatgaacgcaaaaagcggctatgccgctatgcggaactttttggaaacgtatggccggccgcccgaagcgatgtttattgccagcgactccattgcaccaggagccatgatggctctgcgggaacgggggctgcgggtgcccgaggatatcagcatcgtcacctttaataacaccgtattgtcggagtattctgatcctcctctcacttctattgaactgttcatgcgtgaaaatattcgggctgctgccttctgtatgcagcttctctggcaggggaatgtccggggcaagcgaattgtggttccttgcgaactggtgtcccgaggaagtgttgcccctgccccaactgatagtccaccatctgaactatgatccgaatgaacttggcattaggtggagcgtcacaatcagtaataccctacgtcgatccagccaggggaggggttgtccaacaggtcgatgacacacacttttgctctctgttcttcaaactcttcgcagatacatttgccaatgcccttcgcaccgccagtgttaccggacaggaaaacaggagcacaaggcacagtcccgtcatcgcaaagggcagatttcggcaaattcccccgctgatgtcctccatggcgaactgtatctcctcctggtatattttccagctatacggcgtcacctcccagcatttcgtgctccaggacaaaacgcacctggtgttcatcaatgaggcgcttcccctgctggccagcacatcggcggtgacgctggggcggttatttctgcattttattactatccttacctaatgtatatccgagtccgaagcagggattcccttacgggtttctatgtaaacggagggtcacagtagcatttacaaaaaaggctgttttatcacaaaaaaatcccatgctaggacactctgcccggcatgggattttttgtggtcagcgatggaattctttctttttttccagttctttttccaatggtacaacgcctaaaatccggtcaacgttatcctttgctgtctggtattcaaccattgctttcctggcctctttaaattcttcatacttctcttttttctctgccagaagagaagcatattcgtaagcgcaaaataaacccacggagtgacaacatctgacttttctttcataatagttgttagagatgcaagcattttactacattatggatggaggatgaatttatgtgggctaaacctgtttctgtcgatgacaataccgcctgattatggaatgcagatccagtggtcttacagactatcaatggtgttatgctgcctacagcgcatacttcccgcgcttcacaaacctcccggccttttcaaccaccacctgatggtccttcaccacctgggtgccgcgcaggaacacgctctctatacgtgccgtcagcttccttccctcaaagggggcgtagtccacattctgcacctggtccgctgccgtgaccgtatcctctacaccggtacgcatgacaacgatatccgcgtcgcttccaggggcaatgactcccttttcggggtacattccatagagcttggcgggattttccgacagaagctggcacatcctttccctggtaatccttcccgcgtccacgccgtaggtgaagagcagcgtaccccttgtctctacccccggcattcctcccggaatctttgtaaagtcatccttccccagcgccttctgcgctgtggtaaagctgcagtggtccgtggacacggtctggatggtcccgtccgccagagccctccacaggcgctgggaatcctccggtttcctcaaaggaggcgcgcacacatattttgccccttccatgcccgtaagcccgtacaggctgtcatccataagcagatactgggggcaggtctccgcgtataccttctggccccttctcctggcctccataatgacgtcgcagccctcccggcaggtaaggtgcaccacaatcacagggatatccgccacttccgccagcctgagcagcctgtctatggcctccgcctctgcggcagcgggtcgggtggccgggtggctttccacgcccatccttccggcagcctttgcctctgcctgcagggcagctatcatgccgctgttctcacagtgaacaccggtgattcctcccacctccttaagcctgcgcagaatttcaaagatggttttatcgtccacctgggtatcgtatgtcatgtacagcttaaatgaggtgattccctcttccatcatgtcgtccaattccctgctgaccgatgggttccagtccgatatggacatgtggaatccgtaatcgcaggagcacctgccgtccgctctttcatgccagttcctgaggccgtcagccaggctctcccctgtgtactgtgttccgaagtccacgatggtggtggtgccgcccctgacagccgccttggttcccgtggcaaaatcatctgccgtgacagttcccgccacatggaggtcaaaatgggtgtgcgcatcaataaatcccggaaagagaaggcagccttccacatccacaacccgggtatccttgtctgccagatgcccgatttcctccccggttcccactgccgccaccttttccccgtcaatgagcacatctgccttgaaactgccgcttccgccaacaacaattccgccttttaatacctgcttcatatccatcactctcctgttccgtctgtcaatataaatatatttcccagcttgctctccttctgccatggctttcagacgtgttacccttgagcagtaactgccatggccttcggacgtgttacccttgagcagtaactgccatggccttcagccgttccccgtcaatccggtacacggtccagtcactcatggcctgggcgcccattcccagataaaagtcaatgcttggcttattccagtccaggcaccaccactccagacgtccgcagccccgctccaccgcaatggctgccagccggttcaaaaaggcggttccgaagccctggccccggtactccggacgcacatacaagtcctccagataaatgccggacctgcccaggaatgtggagaaattatggaagaacagcgcaaatccaactgcctccccatccttcatccccagaatcacctctgctttttccttttcaaacagccactgattcagcagctcctctgtagccaccacctggtccagcattccctcgtaatcagccagctcttttatgaacctgagaatcaggtttacgtcctgaggttctgcaaaccggaattcaacggccttattcgtcattctatgtcccattccgtgctccatttcatgctccattccgtgctccatttcatgccctgtcccttcaaggttgttgtccataatatcgtctcctcatgcggaacaagcgaaaagcagatggactgcctttcgctgttcatttccaatgttatttttacctcttctttgaataataagtgtcatccatgggaagcgctgtccgcagaatatggtcctttgcgtaataagctccctgtgccgccggggcggtcggtatggtggctatctccccgattccctttgcgccgtacgcaaagggcagcagctcttccttctccacatagattgcatggatatcaggaatctgggtggagcgcatgagtcccagggtgccgtatttagcctggggaacgccattctttaacgggaagtcctcggtcagggcatagcccagtcccatgagaacgccaccctcaatctgcccctgtatggaaatggggttcactacctttccggagtcatgggcagcatacacttcctttaccctgccgtcgtcgtctaacaccaccacatgggttgcaaatccgtaagccacatggctctttggattgggcacatccgcccccagcttatccgtggggtcaaagaattccgcaaagaactcacggccttccagctggcttaagtcccctcccgcttcctgcaatgcctcattcaaatcagcggcagccatcctgatagcctcgcctgtaatcagggtctggcgggaaccggatgtggttcctgaatcaggcgccacctcggaattggcccccatattcctgatcagttcctttccaaggccggttgcctcggaaaccatctgtacgaatacagtggcgcatccctgtccgatatcggaggcagcgctgtataactcaatctttccgtcgtggacagccagctttgcccggcctttgtcgggaagtcccacgcccacgcccgcgttcttcatggcgcaggcgattccggctctgcccggattgctctcataggcatcctttacagccagaagggtttccttaagggctgtggagcagtccgcaatctgcccgtttggaagcaccttgcccggttcaatggcattgcggtagcggatttcccatggggaaatccccaccttctccgctaaaaggttgatgttggactccagggcaaattcactctggcacacaccgaatccgcggaacgcgcccgcgggcggattattggtataatagccgaaaccgcggatatccgtgttttggtagcagtaaggcccaacagagtgggtacacgccctctcaagcacggggccgcacagtgacgcataggcccctgtatcaaaataaatctcacaatccagtccggtaaagataccgttctcgtcgcatcccagggtaaacgtgccctccattgcatggcgctttggatggaagcttaaggattcctgtctggagaataccacctttaccggcctctgcaccttgagggctgccagggctgctatgtgctgtgtggatacatcctccttgccgccgaagccgccgcccaccagcttgttttccacaaccacccggtccggatcccagcccagcatgatggatatttccttcctggtatcgtagacgccctggtctgtggaatataccttcacgccgtccttgtaaggaaaggccaccgcgcattccggttccaggaaagcgtgttcggtaaagggcgtgcggtaagtctgggtcaccacatacctggaattctccagagccttctttgcattccccctggtaacatgacggctctggcacaggtttcccttctcgtgtaccttgggcgcgtcctctgccatggcttcctggacagagcacacgggtttcagctcctcataatcaatctttaccatcctctttgccttctcaaggatgtctctggactcggcaaccaccagacagatagcatcgcccacgcaccgggtgatatctccctttgcaatcattacgtcccagtcctgctggagatggcctaccttgttattggggacatcctcggccgtaagcacagccagcacgccaggaagcgccgccgctttctcgtagttgatatccagaacccgcgcccgcggataccgtgagcgtacagccgaagcatataccattccctccatcaccacgtcatccgggtactcgccgtagcccagcaccttttcccgcacatccaggcggaaggcgcgcttgcccacgccgtactcgtctcccttttccagggactcctcaatccgggcgtcgcctctcaggatggctgccgtcagctggatgccttcgataatcttcttatatcctgtacagcggcagatatttccctttagcgctaccttgatttcctcctcagtggggtccgggacgcggtcaatcagcgcctttccggccatcaccatgcccggcgtacagaatccgcactgcacggatcccattgctccaaaggcgtacacaaaggcttccttttccgcgtcgcttaacccctccgtggtaatgatgtttttgcccactgcccgcctggttgtcaggacacaggacttgacggcctttccgtccactacgattgtacatgtaccgcaggcgccttcgctgcacccgtctttgacagaatgaaggtgaaggtcatccctcagatagcgcagaagcggtttatcctcgctggtgcagcgttccactccatttactgtaaaacaaaagttctctcccattttatgcctcctgcctctacgcctttactgtgaaaatgccgtcggcatccagtatgattcctcttggacatttgactgcacacataccgcaggcgatacactttgcttcatcgattaccgcgtggttattctctatcctgacggcatccgccggacagttctttacacagatgccgcaggcaatacagcccaccgagcaatccttccttgtccgggctcccacatcctggttcatacatgccggataaaccggatattccggcgtggtaatgcgtatcaggccctggggacaggctttcacgcacaggccgcagcccacacatttgccccggtccacatccgcaatcccaaggccatttatatgaatggcgtccatcttacaggccgtcacgcagcttcccatgcccagacatccccatttacatttcagtatgccgtccggatggtctgccaagatctgcctgcaatccccggtcaggccctcacgcggaataactgcctctgcatgacagccccccaggcattgcaccacagctacttttttattgcgcttttgtgccattttattcttctcctttcattattctcacaaaagaataacgttacttttttaacaagcctttgctaaaggagtccccacattttcattgaggactcctttgtacggcaattcgcacacattataacagttcagacactatctacagcatatatgaatagtcgttaatgactgtctggatgattttccggatgccgtccggcacatctgcgtttgcggaaccggctgtgtaatccatgaccttgccctgaagccttaccctgcatacaccggcggcggcatccagtaccgtgaagccctggttcttgctgtcagccatgtcggcctcgttggcaaacagggtgaatttgtcaagatagggagcgctgtcccatggacagaagctcttgcagttgccgcactcattacacatatagtccacatggatgatctgatgcttctccatgcccggaaccaccagggagatattcgctctgttggggcatacctcaacacagttctcgcagtagctgttgcaggataagcagcgggtgctgtcgatgacatgagcattttcctcggccagcctgcccttgcgctcatagatggcttctgcgtccgagagcttaaacaggtcctctgccagggcctttccgatgatggcttctgctgccatcttgccgtccctgattccttccactaccgtggcaggaccgtacaggccgtcgccggcaacatagacacccttcacagaagtctccagtgtctcctggttcacctggggacgtcttctgctgtccagaacaatgccgcagttctcgtagaatgcgcccggtaccttctcgccaacagcggcaattacggtgtcggcaggcacttccactacctggtcagtctccaccacgccgcggcgtccgcttgcgtcgatatctcccagtaccattctcttacagtacaggacgccattttccagcttcacgggagctaagagttcagcgaattccacgccgtcctccacagccataaccagttcttcctcgtcagcaggcatgtagcgtctggttcttctgtataccagggaaaccttctccacgccggcgtttctcttggcagccctggctgtatccatggccgtgttgccgccgccgataacaaccacgtttctgcctaattccaccttgccgtccgttgccttgaaccgggccaggaaatccagggcattcatggtatcccctgtctccagcttaagaattccctgctcggacgcgcctacggccaggacaacataatcgtaatccttcttaagttcctctatatccgtgatttccctgccgttcaccatctccacgcccatggctgccaccagcttcacgtcattgtcaatggcgctgtcgctgatacggaaacccggaatcacattgcggacaacgccgcccatcttctcttccttctcaaacagggtcaccttcacaccgcccctggccaggaaataagctgccgccagtccggccgggccgccgcccactacggccgccttcttatcagaggtaatctccggcgctttgagttttgccataactgcccggaagccgccctctgccgcctccagcttggtcctgcggatatccaccggggactcgtagaagtttctggtacacttgctcatacagttatgggcgcagatggtacctgtgatgaagggaagaggattcttattgagaatgacctccagggcctgctcaaactcacctgctcccgccagctgcagatatctggtgatatcctgatggatagggcatccttcctggcagggggcgatgaaacaatccgtcagcggaaccggcttattgattttcctggaaggaaggggctttactgcctttacatgatgcttgtcggactttacagcctccacaaggccggctgccttggcagcatccacgccctcaaaggcagcggcttctctggccgcaaacagctgtccaatttgctccagtctctcatagccgcccggctttaacatggtggtggccatggtcaccggccagatgcctgcatccacgatatccgcgatgttaaagaagtcagcgccgccggaataggaaatgcgcagcttccctccaaagtcctcggccagcattttggcaacggacatggacagcggataaagggacttgccggacatatacatctcctcgctgggaagctcgttctgttttacgtctaccgggaaggtgttggtgatcttcacgccgaattccagacccttctcgtccgccagggcctggagcctctggagcatgggaaccgcatcccggtactgtaaatcgtccttaaagtggaaatcgccaaaggcaacgtaatcatatcccatatcatccatgatcttccttgcatactcatatccaagcagggtgggattacatttgatgaatgtatgtaccttcttctcctcaatcaggtatctggcgatacgctcaatctcctggggaggacatccgtgaagggtggaaagggttgcgcaattgcatacattgggagaaatggcttccacatcctccctggacaccttctcaaacctgtccagattgtcaagcagccactgcctgcactctttgaaaatggcggtttcagaggcatccttcatgccctcaatgaaacggtcaatcttctctgtcttgattccgtccaggtcatatcccacggacatgttgaactggaagccgtcgggacttcccaggccgtattccctggccagcaccttacatgcaaaccacgcctttacatactcgtcaaatgcctggggcacatagagctctgtggaccactcgcagttatagcactcgtcgtctgccttgatacatggcttggatacgggaaggtcctcaccgtccagcttctgtacggtcttaagctcgaagaaacggctgcctgccacgtaggaagccacgatattctgggtcagctgggtatgggggcctgctgccggcccgaagggagtctccagcttacggccaaaaatctcataggttttgtccgggtccgcaatgaatggcctcttgatgccgaatacagctcccttcttgttctcttcaaggatccagttcatcagttttccaaatggaatcggggtcataatgtcgctcatattattcttatcctcctttataaccagaccaggtcccagcaccggatactgcggacatagtccgcaggctctccatccggctcagccgcccgggagactcagtcgtcccgaggtgccgaaatcccgccgccctgcaatcggatatcacttataaattatacattgtgtctgttttggccgttaaccgttgatggaatgggccagcttctttgcctcttcccttacctcgtaaaggatcttctcctcatccagtcccacaagctccctgttcttcatcagaaccttgccgttacataccgtggtcaccacgcttcttcccgtcatgccgaacaggatgtggccgttgatattggatgcatccataggagtcagcgggatgtagtcagtgacaatcacgtcagcggcagcgccttccttcagtacgcctaactgcttcttaaaatagcggtttgcaatcttcgcgttgccctcaaagagcatctgaggaacctcgccccaggctgcattggcatcacagaggtgatgtttgtgaagaacattggccaccttaaaggattctgtcatatcgtgggtatagccgtctgttcccagaccggtgagaattcctctgtgcacgatttccatggttggcgggcatccgcatgcgttgcccatgttggactcagggttatgtaccaccattgtatccgtatccttaatcagctgcatctcatgaggatttacgtaaatgcagtgggccagcagggtcttttccccaaggatattgcagtccatcagacgatccacgattctcttgccgtacttcttaaggcagtcgtgcagatcctcgattccctccgccacatggatgtggtatcccacctcagccggcttgttggctgctgccagctccatggtctcatccgagatggtgaactgggcgtgcatccccatcattcccgcaatcatgtccgtatcgtctgccagggcatgtttgatccaggaagcgttctccataacagccgcccttgccttatccataccgtccctgtcggatatctcatagcagagacaggttctgacgctcatctcctttgcggcgtcctcaatggcaaacagggaatcctttatctccccaaagcttgcgtggtggtcaaatacagtggtgactccgttcttaatggaatccaggtaagtggccctggcgctctggcgggtctgctcacccgtcagatggcggtcaatggtccaccacatgccgtccaggatatccagaaaaccctttggatcataacctttaatagaaagacctcttgccatggcactgtagatgtgctcgtgggtgttgatgaaggccggcatgatgacgcccccctttgcgtccacatattcggcatcatggaactctttcttaatctcttccagtgtgcccaccttctttattgtggtaccgtccattgccactgccccattttcaaaaaatggctgttctgggtctctggtaaccaggcgaccgttcccaatcactaacataacctctctcctttacatttcataaactttaattcataaactttaataagatagaacaggacttcctgtacccctatactaacaccatacaaatccatttgcaagcagaaaatgcaaaattttttagatattcaaaatttttttgtaaaaacctcttgcaattccttttttttgtgctatgatggaatcataaacaacgcatcacaactttgcgaaatgtttattgtacaaagtcaccagatttgaagagtccgaggaaaaggaggttaagccatgtcatacacactagatttactgaaacagcttgctgatggccttgcgagacagttcggacctgactgtgagattgtcatacacgacctgaagaagcacgacctggaacattccattgtgcacatcaacaacggtcatgtgacaaaccgccaggagggggacggaccttcaaaagtagtcctggaaacccttcacaaggatccggcttctttaaaagaccatcttggatacctgacccgtacatccaacggcaagatactgaagtccagcaccatctacattcgtaatgaggaaggagattccattgactatcttctctccatcaattacgacataacaggcctgatgaccgtggaccgttccattaaagctctcatcgacaccgaaccccaaggggacgtgaagcagcagcccgaacagattgtccacaacgtcaacgacctgttagacaccctgattgaacagtcggtggctcttatcggcaaaccggccgccctgatgaacaaggaggaaaaggtcactgccatccagttcttaaacgatgcaggcgcctttcttataacaaaatcaggggacaaggtttccaagtacttcggaatctccaaatttactttgtacagctacattgatgtaaacagccgcaagtcggatgataaaaaagcgtgatgataataaggaggattatgtaagatggatcagaagattctatgggcggtcaatcatatgcctaagacagatgacaagaacctgccgattatgggactggaggagattgcaaaggcaaggacattccacgaaagcttcccccagtacaccaaaacaccactcaccaagctggaccacatggcagcttacctgggagtaaaggaaatctacttaaaagatgagtcctaccgttttggcctcaacgcattcaaggttctgggcggttccttctccatggcccgctacattgccaaggaaacaggcagggacgtatccgaacttccctactcagtcctcacttctgaccagttaagagaagaattcggccaggctaccttcttcaccgccacagacggcaaccacggacgcggcgttgcttgggcagccaaccgtctgggacagaaggcagtggtacatatgcctaagggttccacccagacacgtctggaaaacatcgccaaggaaggcgctcaggtagacatccaggagatgaactacgatgactgcgtacgtctggcagccaaggaagccgacgaaacgccaagaggcgtcatggtacaggatacggcctgggacggatacgaggaaattccatcctggattatgcagggttacggaaccatggccatggaggccggggagcagttaaaggaatacggctgcgaacgtcccacccacatctttgtccaggcaggcgttggttcactggcaggcgctgtggtaggctacttctccaatctctatgctgataatcctcctgctttcgtagttgtggaagccgaggcagccgcctgcctgtacaagggcgctgctgcgggcgacggacaaatccgcatcgtggacggcgacatggaaaccattatggccggccttgcatgcggcgagcccaacaccatttcatgggatatcttaaagaatcatgtgaaagtattcatcgctgctcctgactgggcagccgcaaacggtatgcgtatgctgggcgctcctatcaagggcgacgcgcctgttacctccggagaatccggcgcagctccattcggcgcgctggcagccatcatgtccatggatgaatatgctgacctgaggaaggacattggcctggatgagaattccagagtactgctcttctccactgaaggcgacactgaccctgaccgttacaagaacattgtatggaaaggtctggataaataacaatcacctgtatcacacccaaaacaaatatcaatgtataatggaggaaatgaagaaatgaatctggattacgcaaaaatcaaagaagcagcaaagaactatgagaaagacatgaccaagttcttacgcgacatcgttaagttccctggcgagagctgtgacgagaaggcacacattgaccgtatcgctgaagaaatgacaaagctgggatttaacaaggtggaaatcgatcccatgggcaatgttctgggatacatgggaaccggcgaaaccctcatcggctttgacgcccacatcgacacagttggcatcggcaacaagaacaactggaacttcgatccttacgagggctatgagaatgacactgagattggcggccgcggcgtgtctgaccagtgcggcggtatcgtatctgctgtatacggcgctaaaatcatgaaggatttaggaatgttaagcgacaagtatacggttctggtaaccggaaccgttcaggaagaggactgcgacggtctgtgctggcagtacatcatcaacgaagacaagattcgtcctgatttcgtagtatccacagagcctaccgacggcggcatctaccgcggacagagaggccgtatggaaatccgtgttgacgtaaagggcgtttcctgccatggttccgctcctgaacgcggcgacaacgctatctataagatggctgacatccttcaggatgtacgtgcgctgaacgagaatgatgcagctgacgacaaggaagttaagggccttgtgaagatgttagacgagaagtacaatcccgagtataaggaagccaacttcttaggccgcggcactgttactgtttccgagattttcttcacatctccaagccgctgcgcggttgccgactcctgttccatatcccttgaccgccgcatgacagcaggcgagacctgggagagctgcttagacgagattcgcgcccttcccgcagttaagaagtatggcgatgatgttaccgtatccatgtatgagtattcccgtccttcctataagggccttacatatccaatcgagtgctacttcccaacctgggttatcccggaggaccacaaagttaccaagtccctggaagaagcttataagaatctgttcggcgacgagcgtatcggtgcccacgctacggtagagatgagaaaggcacgtcctcttaccgataagtggaccttctccaccaacggcgtttccatcatgggacgcaacggcattccttgcatcggttttggtcccggcgctgaggcccaggctcatgctcccaacgagattacctggaagcaggatttagttacctgcgcagctgtttatgctgctctgcccagcgtttactgcaagtaattatactgcatgtaattttactgcatgtaatattgctacaggtaattgctttcattcgtttattgtccgcagggtgttttcccggctgccattcagttgtggcgcggcccgctggttccggtgccatccttttggcctgaggggcggccgggaagcatagggcatacgccctatttttcgcactgctcattcgtatgccgttttccatgaagtccaaatgacctgtttggtttcggcggcttatgctgaaggccgccggaacggctcaggcccacttacattcatgaaggaacggatatcccttttattttgtaacttccaacaacgatacccaaattaaaaattaaacatattaaaggagtcaatcaaatgaaaacattacaggattacattgataagttaaacagcctcaacttcaaggaaatgtacgagaacgatttcttcctgacctgggaaaagacagacgaggaactggaagctgtatggaccgttgctgacgctctccgcttcatgagagagaacaacatctccacaaaggtatttgagagcggccttggcatctccttattccgtgacaactccacccgtacacgtttctcctttgcttctgcctgcaacctgttaggtctggaagttcaggatttggacgagggtaagagccaggttgctcacggcgagacggttcgtgagacagctaacatgatttccttcatggctgacgttatcggtatccgcgatgacatgtacatcggcaagggcaatgcttacatgcacgaagttgttgacgctgttacacagggccacaaggacggcattctggagcagaagccaaccctggttaacttacagtgtgacatcgaccacccgacacagtgtatggctgatatgctgcacatcatccatgagttcggcggcgtagagaacttaaagggcaagaagttagccatgacatgggcttactctccttcctacggcaagcctctctccgttcctcagggtgttgtgggcctgatgacacgtatgggtatggaagttgttctggctcatccggaaggctatgaaatcatgccggaggttgaggaagttgccagaaagaacgctgaaaagaccggcggttccttccgtgtatcccatgacatggctgacgcgttcaaggatgccgacatcgtatatccaaagagctgggctccatttgcagctatggaaaagagaaccaacctgtacgcagaaggcgaccacgagggcatcaaggctctggagaaagaacttcttgctcagaacgcagagcacaaagactggtgctgtactgaggaactgatgaagaccaccaaggacggcaaggctctgtacctgcactgcttacctgctgacatcaacgatgtaagctgcaaggacggcgaggttgaggcaactgtatttgaccgctaccgcgatcctctgtacaaagaagcaagctacaagccatatgttatcgccgccatgattatgctggctaagttcgctgacccggctgacgttttaaagaggctggaagaaaaaggaactcccagggtattcaaataaatcattcatcttaccatgtaatacaatgtaagggctgccggactgagtcctgcagccctttttgtctcaaattatgcaaaaacttggcgggataccctcatatcctgccctataaaggggaaaatcactatggaaaacaagaaaaaacgtattgtcatcgcccttggcggcaatgcactgggcaatacccttcctgagcagatgaaagctgtcaagattacagccaaggccatcgtagaccttatcgaggaaggctgcgaggttatcgtagcccacggaaacggccctcaggtgggcatgatcaacaatgcaatggccgcgctgagccgcgaggacgcaaaccagcccaacaccccgctctccgtctgtgtggccatgagccaggcctatatcggctacgacctgcagaacgcattaagagaggaactctataaccgtgaaatgtatgatattccggttgcaaccatgattacacaggtccgtgtggatgcagacgatcctgcgtttgaagctccttccaagccaatcggccatttcatgacagaagaacaggccaggattgccgaagaaaagtatggttacatcatgaaggaggattccggacggggtttccgccgcgtggtggcatctccaaagcctgctgaaatcgttgaaatcggcgctatccgctccctggtagactcaggacagctggtaatcgcctgcggcggcggcggtatcccggttacccgtcagggaaaccacttaaagggcgcaagcgccgtaatcgacaaggacttcgcaagtgaactgttagctgagaatctgaacgctgatttcctgattattctcactgcagttgaaaaggttgctattaacttcggaaagccggaagaaaagtggctggatgacctggacacagaagaagcaagacagtatatcaaagagggacattttgcccctggttccatgcttcccaaagttcaggctgctgttaaatttgctgaatcaaaaccaggacgcactgctctcattacgctgttggaaaaagcaaaagacggtatccagggcaaaaccggtactcatatccatttagcgtaaaggaggcaatgaaatatgaatacagacaatacagtgaaacagcgcgcatccctgtttgatttggatggtgtgccaaaaatgagccaggcaattcccctggccctgcagcacgtagtagccatgattgtgggctgtgtaacgccggccatcataatttccggagcagcaggcattgacacggcagaccgggttttgctgattcaggcttccctggtggtatccgccctggccaccctgctgcagctcttccccttaggcaataagaacggtttccatctgggctccggccttcctgttatcctgggcgtaagctttgcctacgtccccagtatgcaggccattgcggagcagtccggcatcccggccatactgggagcacagattgcaggcggcgtctgcgccattctcgtaggccttaccatcaagaaaatacgaaagttcttcccgcctctgattgcaggcacggttgtgttcaccatcggtctgtccctctaccccactgccatcaactacatggcaggcggcgcgggccagcccacctacggcgcatggcagaactgggtggttgccatcttcactctggtgatagtcactgtgctgaaccattttgccaagggattcctgaaactggcgtccatccttataggcatgattgcaggctatatcttctccatgttctttggcatggtaagcttcggcaatgtggctgaatccggcatgttccagcttccccaggtcatgcatttcggcatcagctttgaggcgtctgcctgcgtggccctgggactgctgtttgtcatcaactccgtgcaggccatcggtgacttctctgcaaccacggcaggaggccttgaccgcgagcccaccacaaatgagcttcacggcgctatcctgggctatggcttctcaaacatcataggtgcattcctgggatgtctgcccactgccacctacagccagaacgtaggtatcgtggctaccaccaaggttgtcaaccgtgtgaccttaggactctccgcgctgattatactggttgccggactgttccccaaattctccgccctgctgaccaccattccctatgcggtcttaggcggcgcgactgtatctgtattcgcttccattgccatgaccggcatgaaactggtcatgacggaagatatgaactaccgcaatacctccatcgtggggcttgcggctgccctgggaatgggcgtgtcacaggcatccgcctccctgtccgcattccccacatgggttaccacaatcttcggaaaatctccggttgtcatcgctaccctggtggctatcctgttgaatgtcacacttccgaaggatgccggaaaggctgaaaagaattaatcctattattgtaatggtgtagatggaaaacggactgtccctggaggggcggtccgtttttcggattgcggtggatgaagaagtataacttcttaaatatagttttcactatatctatttaattgtgtaattgccatatttaaaatatcaacacaatctcctgttccggcacagacacagcaattcctgacactataaccttctatctaatccccgcccccaaaaggcccatcctgattttccatcagcagatgttcaaaatcctcctgaggcatgggctttgcgaaaacatatccctggatcacattgcagccgcctttctgaggaattcaacggtgtccatatcctccacgccctctgcaatggtctttatattcagctccctggccatattgataacattggacacgacaatgcgttcgcgccggatatcccagctcttgtggaagaataggatatccagcttcagcacatcgattggcagattctttaacaggttaagggaactgtaacccgaaccaaaatcatccagagaacagataaacccgcgcgcattaagattgaccaccagctctgcaaataattccgtgtcagcagccagtatactctccgtaaactccagctccaggacgccgtccggtacagaatatttatccttgatatccgtataaaaatccacaaaatcattctggaacagaccggcttttgaaacgttgaccgccaggctcacaggactcccgccccgttccaggtgaatcctgtaccaacggcatgcatgttcaaacatatagcggtccagtttcacaataagctcgcttttttcaaataacggaatgaaatttcccggcagtatcatccccctgcccggactgagccagcgggccagcacctctgccccggtaatcctgttaccgttctgaatatctatcttaggctgcatatagagcttgaactcatcatctgccatggctgcctctgcctcagcctccagggcggaatcctctaacatacgcctgcggatgctgtcgtcatagaacacgtaggagctttccggtctttcctttgcaatcttatgggccatattggcatagttcaccagcacatccagagactgcttcccatcacccggccggaaccggtaaacgcccacaggaatctccatgaagggctgttcatccatgcccgagtttctcatatattccttaatctggcacagacctctgtccagtacccgcgtatccacacaccgggtaataccggcaaagctatcagccgctatgcggcagctgatacagtcagggccttccaccgtccttagaaactctgccaccagcctgagaagcctgtcaccctcctcataccccagcacatcattaatcagcctgaagttccttaaatcgccataccagagcacatatgcggtgagctccgaacgggtgagctcaggacggttcagaaatatctccgcttcacgcttaaagcccgcgaaattgcgcaggcctgtaagagaatcactgtaagccagtttcatcagcatcctctggttattcacagccatcttccgctgtctgctcatcagccatataaacaaaccgcaggccaccacaatgatgagcatgatgccccatgctgtctgaatataactggaacgcagcacatccacaggaaccatactcacctgataccactgtccctcaataatgggaaggatcaccagtatctgcctgattccctgcctgtccgtaagcacgaaatcccccctgcccctgcccgtgcctcctatggcctctgcaatcctcgctttattatcaggaaggatgtctccctcatatgtcttaatggtcttaagcacataattgccgtttacatccaggatattggagtaaccagcccctttaagaaccggtgcatcaatgatttccctcagtacggcagccgaatggaccgcacagagtatgcctctgacatcgccgctgctgtcgttgattctgacgccaaaatagtttatatatccacttgcatcctgttggtccgcaaatgtgttggatatgctttttccgccctgtaaagcccgctcaaaaaattccattcctttcagattaacctattgggcattaccttccatattccaccatacgggcattaccgttaatatccgcgtatcccatacggataaaggcattttccttatttatatcttttaatatggtcatgatctggctctcatccagcgttgccagctccctaagacttacagccagtccctccagcgtctgccagtctccctcaatctgttttaaaatggatgtcctggtttgattggcagcatcatacaggtatgctacgttctctttctggcttttcagaatcatctgaacaagaaaaataatgcttctggctataaaacataaacaaagtatgataggaagcagcgtatccctgcggctctttcctctgccatctgcagatgtcatctcatagtacccctgtcttatttggactctaaaataataataatatatttcatataaatatcaatgacaaatatccccagaaacagtaccacatgctgctatatgatacaatttccggggtatacacaaggcgttatttcacttgttttctattcagccggtttatatataacctactcattcagctcatatgaaaccgtcacctgggcttccacactgacctggcccggcattacaggagcgcctgcatcttccaaagccacagctgacatcttggcagaaccccccgaattataggaagcatatctggtatccggctgatagccgaattcctccacatggaccacaccggccaatgtctttgcgccggcctccgccagagcctgtgctttggcctgggccacggccatggctcccttcagcgcctcctgatagctggcatcatagctgctggaaaaatagctgacggaattaataccgttgactcccgcggccactgactttgtgatgatggttcctgcattgtcaataggtatgtcggatactgtcaaattggtcgtcatctcatatccgattatctcctgtttatccgaattccaattgcggataggactcagaccataggaagatgtctgtatggaagtttcttccactcccaggccctttaatgtctcaatggctgcgttcaggtcactggcattcttctcctggcaggcagcggccgtatcctccctggtatagacggcatattcaatccgggccatgtccggcaccacctttacctcctcacgccctgtcaccgtaatcacattctctgcggcatctacattctgtaccttcaacgtgtccggcatctgcgtccctgccgcacatccgcccagccctaaggctgcggcggccactgccgcgctgatacccgctgtgtatactgtcctcttcataaaatgtttcataattgcctccctcttttctgttttcatcggaatccattcatatgatacaggcgtactaatatgccctatccttatactaccagaaagagagaattctggtatttcttttctcttaattatagaggtatgtttcattacaaagtttctacgaatttatttctggcaatgcctgctgctcttgctataactttccgctatctccgtatcctgcctgtctatattttgtcactgcccttgacagcggcgccggaaactgctaatatagagtgagcgcgggatttcgttagcataccagataagcgcagcactgaatattcaggggttgtactggtttcgacgggggtcatgcagctggtgaagctatccccatgcgatgggttaaatggcaaaaataaatataaacgctaacgacgaattagcaatcgctgcctaatggcagctgtcagacttagagcacccgcactttaagaccctggcatcgactatgtgggaaacgacgtatgcaaagctttgagcatatgggcgtatgatgaagctactgaaaccatccgggtgtcctttctctgatggcagagggaatgtcaaataaaggactatgatagtagaagaacagggaattgattttcggacaggggttcgattcccctcagctccatgctgaatgatgtcggtttttccttattttataaggaattccggcattttctttttagaaatgcttgataaccttactaggattttgattaccttttttgattactttttaggctgttttcattggaattgcagcccgatttatctgctgtgtcttggtattattattcttgttacacatacctatcccctgcttctgattttggatattcttcgatgtcatacgcattaaatacttgttcttctttaccggaccaccacgcggtgcttgtcatcatacatgttcttcgtgatacagttcccgttctcatcgtaccaggccgtcatggcatggctgtcatcgtactcataccggcgctcattacctgccgggttcgtggcggataccaggtcccctgccccagcattccgctggcaaatgtctcgtcttttacctctgaaagcggtatcatcccgcctgtaacaaggcttgtaattgcaaattcccggtggcaatcaacgcatagatgatgttacttccatattctggagaggcgtacataaagatagggccctgtcagaaatcggatagtatcatagggctgatcctggaggcatttggattgaccgttgaagacgttcagccccatatggtccggatggtcgtgggtaataaacacgtccagatccttataggacactccaagcgcctccaccataccgcgcggtatctcctaatcctgttcaaaccgaaaagaggtatccaccatcagactgcgtcccggctgccggatcagatagagattgcgtggactcatatggcggtcagaataggaaatcgtctcctgaaatagattgtgataaattgacctccattgtaatttttcggacaaatgcaaattagattttctgactgtaattagaatacagccggaattttttcgctgtttactggcattttctttgttcatcctgtataataagtatatcaatttattggagtgtattatgaacttaccacaactatactattttcgaaaactggctgaagtccagcattatacggaggcagccaaggcactttatattacgcagcccagcttaagcgattccatcgcatccctggaaaaagaacttggggtatcccttttccagaaaaaggggcgtaatatccagcttaccaaatacgggaaagaattttaccagtacgtcagcgaatccttaggtatcctggagcacggcatctctctgatcaaggagaaatcaggtcatatcagcggctctatcgatatcggatgcatccccaccctgttaggtgactttttaccggaagcgctggagctttatcacgagaagaatccgctaaccacgattaatatctatcatggaatgtccattgaggtggctcagggcgtttccggcggtaaatatgacatcggcttctgttccatggtggacgacatgcccgacctggtcttcgtccccatcacctatcaggaactgatcgccattgtccagaacaaccatccgctggcagaccgcggcgccatgtatctgtctgacttaaatggttacagattgaccacctaccgggatacaatccccatcggcaaggtcgtccacaagctgctgaaaaaaaaaggagtggaggccgtctattcctatgacgacgaaatctccattgccggcaggatttccaactcctcaaaagtggccattgtggcagataccccctttttgaggcagttcagtaatctttccaaggtccggcttcttgatgttccaaaagatacccgcatgatttatatggtatacagcagtaaaaacttcatcacttcagccgtggaagcctttgcgaacttcatggtcgcccattgcttaaatatgccggagtaagattccttcacacctgccgcatagctgtcacacaaaacgcaaaaaaggaaccgtcctctgctctctgaaccagaggaacggttcctttttccatactcacaattcttaaaatgtaataccaaaggtagccatcaaagcgataaccagacccgctacagccgctggaatcatggttcccagaatcacgtgcttatagctctcctttaagctgcacccgcagatggacattgtaagaatcgccacggaggagttaggcagcttatttaaaatcagggccgactctgccacgattctgtgaagagcctggacattgactcccatatccacaaacgcctggccgaagctctccaggaatatggtttcgccggagattgcggatccggtcagaccagtcagtaccgcggttccgaaataagcctttaaatacaccggcatattcatggccaaaacggcctgctgcagttctttaaacgcaggcgacagactgagcaccttggaaagtcccataaccgccgcaaccgtcagcatagaattcagtcctgatcctgcgcccgttttcgcggaggatttaatattttcaatatgcttaaactgtgtcgctataatcagcagaatgcccacggtcaaagaaaacaggatactcgtggaggttccccagctggaggtagccactacaatgccaaacactacaacgaacggaagcaccgacattccgataccaggaagttcttcatcgctcataatcttattggagtcggcatacatggccagcagttcttcattcgtatgttttttgtggctctgggcctgggcatagttgaaatatacgaagtagcacacagccacgattacggtaaacacaagcgataagaaaggcgccgatcccagagacgttcccagataaccgctgggcagtacgttacagatatccagggtgtacatgaatccattggcggaagctccgccccccagaagcatgaacggaagcagcctgcggtccatcttattttcacggagcagattatctgcgatcggatacagtacaaacaccatgatatatccattgatgcctaaaagtgtgataaaaaaagtacagatcaatataaccagaccaaccatcttagctcccagcttctgtgtcagccatttggctattttcgttgccagcccggtttccagcaccagttgtccgaagatgcctcccatacccagaatcaggaaccaggaagttacgaaaccaccggcgccgccggagaatgtggtaagaagaccgtcggacaggctgagctgactgcttaataagataattaccgccgtaattacggtagcagttatcatgtcaatccccttgatgatcataaccaccaggagagcaatggcaaaaataagacccactgttgctaacataaaaatacctccatcatttatttttcagttccggcctgcaccttcctgccgctgtcatacgctccgtccggccatccgattatcacattcatcaccgtgggaaggatgggggtgaataaattgatataggatgccgcggtcagtcccttggataccagtgccgtaagccctgcctgggaaatcacccaggtaagacagatatagacaaaggtaaggacagctccccgccggttgcgtttagctttggaaacctccggatcttccccggtccttttctgatacccgttcagaacacggtcgttaaagccctgcgcatagttgatcgccgtggagattgctgcgaaaaagattgctacggtaagcggcgtcagggaaatagccttgacagcgccgcccgcccagccgttctgtaccaccaaaattatatatacggcttttccgtttgcccagccatcgtataccgcgctgtagtttcccgccagattgacggcgttcatctccaggaaaatccagtttacaatcaccgagagaactaccgcccagcgcagcgttttcttattgttaaaaagctgggcatgattcacgtattcccccctacttttccgtttccttttctcgtgtctgccagtgggccgtcattcggtccaacggcatttccaaaagccccgttccctcagaatatgcgtaaaccgcaaaaccccttttacagcgaaacacacattccaggcagggatcttcatcacagtagcagaacgcatccgtatctgccagtgcaaataccatgggggaacgtttttccttcatcacgtgttttaaataaccgccggtgaaggtcttcagataaatccactgcggaacgcattcctgccttttcgtcttccaggatacctttacggcgttgtcgttatagccgcccgtaatctggtagctcagttccaaaagctcctttgccccttgggcgtccgttggcgccaggcgctctgcttcctcattgcagcagagaattttcttctctaaaagcgcctggcctccggtaactggaaataagctgttacagcttctgcagcgataaaatacaacatccggacactgatccgcgcgtggttttcgggtatcccggcaccttctcggtccaaatttctgctcaatcattgcgatatcaacccttcattcttttttccagttcctcttttaacagatactttttcacctttccgctgcccgtgtggggaatacggtcgatcagctccagcctctccggccaaaaccgtttcgggactccgttctggcagagccagccggtcacgtcctccagcttcagatgttcaaatcccggcagcggcacggcaaaggcgcagattctctcgcccagccggtcatccggcattccgatcaccgtatggtcgcccattcccgggcagccttccagccagtcattaatctcgttggaattcaaattctctccgccgcggacgatcatatctttctttcgtccaataatgtgaatattgcccgcttcatcccttacgcacagatccccgctgtgaaaccacccgtcgtcatccagcgcgccatccgtaatcttcttatcctttaaatatcccacaaacacattgggacctctggaaagctcttctcccggtactcccggcggcacgtcgtttccctcgtcgtccacgacgcggatttcaacgccttccatcggacgtccggaagtggtcccgtttaattccagcgcctcatcgggccgtacaaacacgtgggggacgctttccgtcgagccgtagacctcacagagcaggattccgaagctccacgccttctgtaccatatatcccggcaccggagcgccgccgcagaggtaaagcttcagaaacggcagttctccgccgccgttctccagttcccggagaatatcatagataaatggcgtagcgcccatggagaaggtgcaccgctcccggttcatcagatcaatggcctcccggcagcggtacttctgctgaagcaccaccttcgccccgatcagcatgggggttatcagcccgtgatggaagcccgttgcgtggtttaacggcgcgggcataaacatgatgtcctcacaggtcagtcccagttctctggtaaatacctcctcgctgtaacggatattattgtgggtaagcagtactcccttcgtcccgctggtcgtccctgaggtgcagagaatcagcgccagatcctctcctgtccgcccgctctctgtctccgtccggtctgtttccgtctgatctgtttccctctggtctgtttctgtctggtctgtttccctctggtccgtctccgcatgttccgtatccgtccgcccagtctttgcatcccatcggtccagaatttcctcaaacgccaataccccgccggcctccggcttttcaccgcccacgatgacgacgcaggacagcgacggaatgcgttctctcacagccagaatccggctcgcataatccgtcttatgaaaaaaggagggtccgaagtaaacctttgactccgttaaattcatgctccgtatcagttccttttcctcataggacatggcgatgggatgggctacggccccgctcataaagcaggcgatagtcaccaccacgaactcgctccagattgggagctggaacgataccgcgtctcccggcaaaacaccctgcttccggagaaaggccgccactttcgacgcggcctcatccatctgccggtaggtataccgattccccctgtcatccaccacatattcccgttcggaatacttcttcacggattctttccaacagtccagcagcgtgatatccttccagtaacctttggaaagatacttttcccgctggatggcattgatcttcatctcatcaatcatgccccgtctcctatacctttttgcgcgcatcctgccggaccacgcctgccttcagcgcatgtactgcggttatgccctgtgaaaactttcatcatccctgctgccttgcctttaactccttcacaagagccggaacaatctcaaacacgtcgcctacgatgccgtaatccgccacctcaaagatcggcgccgtatcgtccttattaattgccacaatggtcccggagccgctcatgcccgccacatgctggacagcgccggagatggcgcaggcgaagtagatcttcggagttaccgtggttcccgtctgcccaacctgtttggactgcggcatccagccggagtcaaccgccgctctggagcagccgaccgttccgccaagtacgtctgccagttcctttaagactttgaaattctctccgttcttcatgccgcggccaccggatacgatcacctccgcgtcctgaagcggaatatcgttgtcctcacacgctttaatgaaatcaattaccttagtcctgatctcgctttccggcgtgtggattgattccatgatgatctccggcttgttattcggaatcctttccggcttcttaaacgcgccaggtctgcaggttcccatctgcggccttgtctcgctgcacaggatctgtgcgtaaagatttccgccaaatgcaggccgttcccagaccacatttccgctctcctcatcgacgctcagcgccgtacagtccgcggtcagccccgtacgcaggctgactgcaatcttagagcccaaatccctgccgtttacggttgctcccaccagaatcgtattgggatcatacttttcgcagagcttcaagaatacatttccataagcgtcagcggagtaattctcgtattcgtctccctttaccacatatatcttatccgcgccgtactctccggcctctttcatcgcctcatccacatcctttgcgatgaccacggcgcataacttctgctttaagccgtccgccagctttcgtccctggccaagcagctcaaggcccacgcttttgggctgaccctggaagcattcgataaatacccatacgtccttacatgtatcaaaactcatctctcgcgacctccttttgccgtccttaaagtacttttgcctctgtcagcctgtcaatcagggtccctgcggtctccgccgggctattgccttcaatgttcatgcagtttgcatttctctttggggtaaaggttgcttttacctttgtcggggagccctttaagcccatcttggtggtatcggaatccggcaggctcgccagagtgatctctccgatctctgcttttaaggaattaagcactcctttaatggtagcgtatcggggtttgttgctctccttagtcgcggtacacagcaccggaaggctggcctcaatgacctccatgccctcttccacctggcgtctggcgaccaccttgccgccctcgatttccatattgagaatatacgtcaacctgactgcccccagatgctctgcaatgctgggagccgtctgtcccgtatctccgtcgatggcctgtttgccgcccaggattacatcgaacccgcccagcttcttaatcgcctgagacagaatataactggtagcatacgtatcggaaccgccaaaagcgcggtcggtaaccagatacgcctcatccgctcccatagccagcgcttcccggagcaccgccttcgcctgaggcggtcccatggaaatcacggtcacttttccgccgtaacggtccttcaactgaagaccggtttccagcgcatttttatcaaaagggttcatgatactcggcacgccggtacgaatcagcgtatttttcaccggatcgatcttgatctcagtggtatccggaacctgttttatacaaacaacgatattcatcttcattcctcctcgtcacgaacgcgttttacttatattccttatttaatacgttagcaatcgtcattctctggatctggttggctccctcaaatatctggaacactttacagtctctcataagtttttccaccggatactctttgctgtagccgtatccgccaaatatctggactgcattggaggtgacctcctgcgtgcagtcggacacaaacgtcttacagatagagccttccttctgcaccatgattccctgatccatcatccgcatggtgttattgacgaggcatcgggatgcttcaatcttaattgccatatcggccagcatctgctgtaccatctggaatttaataataggagtattaaactgttttctttccttcgcatacttaacagattcatccagcgcccgctgcatgatccccacagccaacgtggccacaaaggctctggataagttcagagcgtttaaagccagcttgaacccggagccctcaggtcctaccatagaagaagccttcacacggacattatcgaaaatcaaatccgtggtgttggaaagcctaagacccatcttgttctcatgggctcccacagtaacgcccttcgcatccgcatcaatgatgaaagcagatatgcctctgtgtccccccgccggatccgtcttaaagaatcccacgaagacatccgccagggcgccgttggtgataaaggtcttggttccatttaaaatatattcatccccgtccttcaccgccgtggcgcgcatagccgcggggtcggaaccggcattgggctccgtcagggcaaatccggcaaaccggccgggggcaatcttatctgcaaaatactgtccctgctccttcgttcctgcaaggattacatttctaagcgccacaaacgtggttacgaaggtgatggcgtaacccgcgtccaccttcgccagctcctcaaaaatcatggcggtggtctcatagctcaaaccggttccgccgtattcctccgggatctccagcatgtgaagtcccatatcaaatccccatttaaacagctctctcggacactcccctttctcgtccgcgtcctttacatgaggttttatttcattttctgccatctcccttaccagagcaagcagcgctttctgttcttcggtgtaaagtaagctcatgatattttcacgttcccctttctggttgttcgtttttcattacagaggtttcagtcctgttgcgccttctgcggctttggaggcaatgatctcttcaatctgctcatcactgtatcccagatgcttcataatctccaccgtatgcgcgccctgcattcctccgatcacatagtccggctttcccagagatgcgaagcctaccgggttggtcggcatgatctttccgcctgacggataaggaatctttgtcagcacatcgttggcccacgcctgctcatcctcatagatatcgagcggctcatacgcggcttcacacggcatatcattttcctttaacatcttcatcaagtcatctctgtcgatcttcgcaatggcgccatccagcacatcggtcacgtctttattcagatggttgttgttgacatccgcgcagtgacggtactgctctttttccagcatttccggacagccaaggagtgtgaacatcttctcatagtcgcggtcatattccggacagcagatgcagacccatttgttgtctctggtgcggaatacattgttaaatggattggaaacttcttttctgctcttagggtactgatttccatactgtgcggagatcaggcctgtgctcagcgcatagacagccgcgtgatgcagtccgatggtaaccttgtctccctcgccggttttctccctgcggtacagggccgcgcagatgccggatgccagagacatggcaacctggaaatctccaaaaccgttggtaggaatcatgggggcgtcgccgcggtttaccgtggttccgaacacgccgcctctcgccatgtaacaggtcacgtcgaagcccgctgtatccttttccggtcccttttcaccgtatcccaggacctgggcgaaaatcagtttcgggaacttctcctttaaggtatcgtagtccagtcccagcttcactaaggatttcgttctcgtgttggtcacaaatacgtccgcttcctccagaagcttataacaaatctccagacctttttccgtcttcaggttcagagtgataaatttcttatttaagtttgccacatcaaaagccaggttctcgtcgtcggtaaacggcatgttaaacacggcgccctgagtcctggcaggatctcctttatgagattcgatcttgatacagtcggctccccattcgccaagtacgcgaaccgtggtaggagccgccagatacgtggttaaatccactacttttacgccttctaatggtttcatcattttccctccatatatggaaaagggcccacaggtccggagtgtgaacctgatgacccttttgtgtcagatatcttcgttttcaaagcgggttgcccggaacacctattaatacggtttagacaacgtattcgatatgagcgccgtgtttaatggtatttctggaaattgtgattctctgtacggtcggagcgccttcctctaaccacatggcgcggcagtcacggtagagacgctcaaccgggccgtacttgcagtcttcaaagtatccgacaccgccgaagatctccagcatttcatcgctgactcttctggttgtatcgatgctgtacagcttacacatagcagctttttcttcgatatattcgccggttggattctccatataagattttgcaaaatcgtaaaccatgcagcggagagcgtgtaccatcatggacatatcggcaatcttgcagcggatcgcctgacgggttccgattggctttccgaaggttacgcggtcagcggcatactgtaaggacagttccagcattctctgtgccattcccaggttgctggcagcaatatgggcacgggatacggataaggagtgcattgcaatttccagtccctgtccctctttgcccagaaggtatttcttgtcgatgcggcagtctgtgaatttcagctcgccatggccggctccccggcatcccatcatatgaggcatgttgataacttcaaatccgggagtgtctaacggtacgaagaatgcagacagtctgtcattcttatcagattccggattggttactgcaattacgtaagcgaattcgcagcagtcggtatgggaaatcagtgtcttctcgccgtttaatacgtaagaatcgccgtctttcactgccatagtatgtaagtcagcgccggtaccgccggtcgcctctgtcagagcaaaacaggtaaatacttccttgttctggaacttaggcatatattctgcctttacttcttcactgccgtaatcctccaggattctccagtttaaatccatcgcatagtgaagatgcattctcattccgcccggtcctctggagaactcttcctgaacctgtaaaatctccagctcattcaatccgtatccgccgtactcctctggaagggaacaacggtataaatcattctcgattgccaggtcgtagaactcctgaggaaacttattggttacttccacttccttctggatttcctcaaggggaccctctgccagctcacggatctgctttaaatacgcctggaattcctcatttgataacttgctcatttgttatatcctcctataataggttttgtggtggttagatacctaacagccagttagcactaacctttccattgtttaagttgtagaaagatcacttactatgttaaatgcagtcggtattgatgtttctaaaggcaaaagtaccgtttcagtcctgcagcctggcggtactgtgcttaaaaatcctttcgatgttgtccactcttccagttccttaaataacctttccaggttcatacaacaccttgatggcgagaccagggtggtcatggaatgcacgggtcggtatcacgagccaatcctccattccctccatgatgccgggatctttggcagtgccgtgaatccacacctgatcaagaacttttgcaacaacaccttacggaaggtaaatcggatcctgctgattccaggaaaattgtccgctatgctcttgacaaccgggcttctttacggcaatattcaactatggatactacccgcacacaacttaaaacccttaattcacagatggacttttttacatagcagaaagtcgctgccctgacaaatctgatctcgcttctggatatgacctatcccggtgtgaactcattattttccggccctgcgcgtgatgacggcagcgagaaatggcctgattatgcggaagctttctggcatgtggactgcgtccgtaaaattggcctaaaagcatttacggagcgttaccaggcgttctgcaaacgcaacggatacaactttcagtccggtaaaccggaagaactgtacccaccgggaagcactgactgcctttgccggagtggatcccgaaatcaatgaatccggttatttccgttccaaaagttatccggcatcaaaatgcggaccgtcacggctgcgaaaaaccttattcctgattatgacatcgctgcttcagaaatctccggcagatgatcgggtgtatcagctccttgacaagaagcggtctgaaggcaagccatatcttgtctatatggcagccggtgccaacaagtttcttcggatttatcacggcaaagtaaaagcgcgcatagccgctcaggccaaatccgaataatcgcatattattttttgaggccggctacaatggcggtcttattgtgataccataaatcacctccttaaataatttgaaaaaccatcaatttaggcttgactttttattagcgggcttatttattcttgttaaatatttttttaacaatcttgacaaatctattatagcctgttgcgaaggaaacatccaatcggctctgtccgcaataactccgttaattgatagttaaaacctataattcctttttcccgttgtaaatggattattgtaatgatatagtatagcctgaaggaggtatgcatccatgagatcagagataatggacggcattctaagacatattcatccgatcggaggcatagaaaacgctaagctccttgaggtctctccgggccacgcaaagctctccgtggaaattactcagaaagccttaaatctttacggaaatgttcacggcggttttttattctccctctgcgacacggcggcaggaatgtctacttacgcctacgagaccgtcaatgtcacggaatgcagcagcatcaatttcttaagaggggttaataccggaaccatctatatagaatccaacgccatacacaagggccggaaaaccgtggtcaatcaggtaactgtcaccaacgacgctggcaagctggtggcatccgcaagctttacgatgtttttaatcgcgccgatctagtgtttcatccagttagaaaccatactgccagtgctgaatattttgtcaggctgcaaggcggaggaaggaagcggagtggttcccccgctgactgacgacaacgccagaaggcaaaataggcagtgctggcagtatggtttctggccggatggagcactagaacgatcagaaaaacagatagaggagagcagatcgcaggaggcaaggaccgcactgacggatctgaatgaaaaatatggattataaactcgtaataacagaacaggccgtggaacaattggaccacatcatggaatacctcatatcccatcttaagaaccgtcctgctgaaaggcaaccgcctgatgttaatgggcctgactgcctttatctcaattatatgtgtcatcatacagtatttcttcccccatcatgtcatccacatctaaagagttgtaagaaaatttgtttttgagctcagccagttcaccggatgcgtatgatatggccagtggaaagctgcataaatccgccaatgcattcagatcctgtttctttaatgcggattttaccctggaagccgcatccctgatttttttctgtccctcccttacttatctggcaaatggaacatacgccggcaggctaaaggcgcaccagggaatcggcgcagggtttattgatgggaatattgtaaatcccccaatacattatagtttttgttaaccccaacaaagaaataccttctcctaaaatgaccagttccccgtctggtcattttactttaccggcaccgcagccaatgattccattggccgctctgcccgggtgtatataaacaaacagcatttcgtaccatatcggccaaaacgctgtttgattatgtttatttatgtttgtttatgtcttattacgtttgattatgtccgcttacatagtactgcgtcagacagccggatgcgcaccatccagatatcattcccgacagttctgacggattaaggttctgctttccacaaaccatgcagattacaatatgcgtatgcggcttctacctcatctccttcacagagcatgaactctgcctgcggcttctgtcctgcctccagctcttttctctgatttccctgcctggtagccagagcaatccactggatgtaatgttccggaatcatggggtgctccgcagagcctactgtgacagtgaccttagccccatctatctgaataacaggcacatgcttttcaactgctgcgtctgtggtgtttggtaccagttcctgcatcttttccccgcaacagacaaccgggacaccgctgctcttcacataggcaattatgttgccacagtgattacaaatataaaatttcatgttgtacctccttttatgtatggtctgaattcagtttatcacaattctgtcttactgcaagacaatggcggaaaattaacaataacatagcagaaataatgaccttaatcagcctgaccatctgccctgcccgtctattcacaaacttctcacattctgttcataattccgttacagaatcataaaattttcctcacattttgcgggtatactaatttatgtaaagagctaatgctaattaaactttttttcataatactcggccggagggatgaagtccttccggcctcctcctttttgttcacctttttggattctttttaatatccccgcatatgataattaaaaaaggatattttttatgaactatgaaaatctgactcccgtagtcggggtcattaccaacatttccacacaggaaggggattgctgtacccaggttataaccctcagtgttgagggccagcccgtcaacatgattctctccgacgatacctttgtggtggacaccatgcgcctgatgccaggtatgcgtgttgcagctttttatgataacaccctgccggtccccctcatctatccgcctcaataccaggctgttttaatcgccgtagtcaggccagaggaggatgtaaacctttcctggtttgatgaaaccctcactgcttctgaccaatcgctgaagctgaacctgtatcagtccacagttttatcaaccttaaacggccagccctatttctgtttcccggcaaatcattttctgctggtatattatgcggctacaaccaagagcataccgccccagacagctcccaaccgggtcatagtgctgtgttcatagacctgtaaggaatcattttttttcattttcacaagactattgtaagaatgcataaaatactttttttcattctgcaaactttgtgcacacttttttgatagcgtatgctattataattaacgtaaacccccccaatacattatatagtttttgttacaccccataagaaacgaaataccttctcctaaaatgaccagttccccgactggtcattttacttttccgtctttagctatcccatttttttccaataattccccctaaaatgtttctctgcttttttctcttcttttttattaaaagtactggacaaactgaaatttatatgatattatatataagctgtcgctgagatgcacagataaggcctgatggtcaagcggctaagacgacgccctctcacggcgtaaacccgggttcgattcccggtcaggtcatgaaaagcaagtggatttaactgcttgcttttttgtttttccgctgattccaaagcattgtaagaaatagttaaatgaagtgaattacatttttcaaaaaatactggacaaactaaaaactttatggtatcataaacaagctgtcgctgagatgcacagataaggcctgatggtcaagcggctaagacgacgccctctcacggcgtaaacccgggttcgattcccggtcaggtcatgaaaaagcaagcggatttaactgcttgctttttttgttttccattattctttatcgttccttcaatgttattccattcgcttccttgtctctgcatcaatcaggccgcgcaggtcttccagccgttcatcccggtcaaagtattccttaccgtagtccagattgaacgcataatcaaacccggccggatttcttccctggctgtgctggataatggtttcggccttatcaagggcctttaccaatctggcttccggggtaatgccctggctgtattcctcccacagcccggacacctcccctgccccttcttttggcaaaaaactgcatatccgctgtatatcttctctttcccggttcagcttatcatcggcgtccggcctcagcgctgccgatatatctccgctgtaccgttcccccaggtcgtgaaccagacacatcatcagcaccttctcccagtccagttccggaaattccctgcacatcaccccggcaaacaaagccagccgccaggagtgctccgctgtgctctcctgccgtccctcagcagtccaggcagtgcgcagggtggacttaaggccctcagcctcctttatgaaatctgtgtattcctccacttcaccgggctcattcctgccaatcctcataataccttctcattccaatccctaatacagattttttaccttgaactccttttccagttcccttctctggtccttcttggcaatgtccgcccgcttatcatagagcttcttaccgcgggccaggcccacctctaccttcaccagacttcctttaaagtatacctggagaggcaccagggtatagcccttctccgcaatcttgccgttcagcttcatgatttcatatttatgcagcagaagccttctgacgcgcagggggtctttattaaatatatttcccttctcgtaagggctgatgtgcataccgcacacatacacctcacccctgtcaatcttcacgaaggcttcctttacgctgcattttcccatgcgaatggattttacctccgtgccaaaaagctcgattcccgcctcgtatttctcatcaatgaaataatcatggtatgccttcttattgttcgcaaccagtttaatactttccttccccatggtatttccctttctttcatgtcatgattgcatatgggatttacagccctgcacggaagcttccttgcccgcgctcctgtcccagtccctgggcaggatgaaatccactgttctcagcagacggtccgtagacaccacctggacccgtatggtctgacccagcttaaatgttttcttggtcatctcacccaccagttcgtagtgctgttcatcaaatatataataatcgtccctcagctcgcttatgcggaccagcccctccaccgtgttaggcagctccacatacagcccccagttggtgacgcctgatacgacgccgtcaaactcctgcccgatgaacctggacatatactcgcactttttaagcttgtccgtctcacgctccgcttcctctgcacggcgctccagggccgaagtctgcatggccactcccggcagtatggcttcgtaatggctgaccctcttatttcccagtccgcccttcagactttcctttatgatacggtgaatctgaaggtccggatatctgcggatgggcgaggtaaaatgcgtataatacctggcggccagaccgaaatgaccggagcacagggtggtgtacttagcctgtttcatggagcgcagggtcagcctggaaagaagcacttcctcaggagtaccttctatcttatccaaaagcttctgtaattccttcggatgaatctccccctgctgaagacggatgaaatatccaaaattatggataaaggtccccagctgcttcatcttctccgggtcaggattgtcatgggtcctgtagaggaagggcagggactgccagaaataatcctccgccactgtctcattggctgccagcatgaaatcctctatgatttttgtggcggcattgcgctcatagggcttgatttccagcggctttccctgggcgtccaggataatcttgctctccgggaagtcaaagtcaatggctccccttttcctccgcttttccctgaggatatcagatacctccttcatcagcctgaacatgggcacaaaaccctcatactcagccataacagcctcgtcctcgtccgtgacaatggcattcaccgccgtatacgtcatacgccggtccacatgaatcactgtctccgcgattttatgatccagcacatttccctggtcatccagttccatgatgcagcttaaggccaggcggtccgtgcctgcattgagggagcagattccattggacagcttgtggggcagcatgggaatcacccggtccaccagatagacgctggttcccctctttaacgcctccttgtccaggggacggccttcttttacatagtggcccacatccgcaatgtggactcccaggatatacccgccctgtccgtccctgcacagagttaccgcatcgtccaggtccttggcgtcctctccgtcaatggtgaccgtgcgaagcccccgtaaatccagacggcctgccaaatctccggtccagtctgccggcgatgtcaggtccccaatgccgtaaggtccgtcccaggtttcttcatcccttgccgggccgggcacagccacctcatccgggcacccttccacctcgtccatgacctccggcggaaactcctccggcagtccataggctctcacaatggacagtatgtctgttcccggatcattgacatgacccagaatctcggtcacaactccctccggcttatggttcgcgtctccaaagtccttaacccgcgccaccaccttatgtccggtgacagctcccatatcacagccctggggaatgaaaatatccttggaaatcttctggttatccggaatgacaaacccgaagcccttgcttttctggtaatacccaaccacctctttgttggcatgctccagcactttaagcacagaaccttcagcccttcggccgtctccccggtcctgggattccaccacaatctgtacccggtccccgtgaagggccgctcctgtcctgtcctcagggataaatacatcctgccccatgccttccacagtcacaaatccaaaacccttgggatggcctgaaaatatgccgttaacggaaaaaacctccggttttccatattttcctttctttgagattccgattctgccctctgacaccagataatccagtacctgtgccagttcatctctctgtgattttgggatgcccagaagcatggccagctcctttgccttcatgggcacataggacctgtcattcatcacctcttccagcatttttcccttctgttccaatatttctttttccatattacctctttctcaaaaatgtcccgcctgtccgaaaacaggcaaaaatacgcctgaatgaaataaaacacccttatatgaatacaagggtgttttcgtcacttatctgttatcttaattaccccatgaccttaagtatcacgttcagggcaatggtaatgagcatgaatgcaatggccccatacctggtaaaatgctccagcgcaccttccatggaacggcctctattcttactccagtaactgtctgcggagattccgccaattgcgctccccagcccgttggacttaccttcctgcatcaggataaccactgatattgcaacaccaagaattacatatatgattgacaaaataacatgtattactgacatccgcctgcacctcttcattttcttatagtcaaacaaaaatattttaccatactttgtcctaaaacacaacccgttttcctatatttttataggcaggacaccgtaaagataccgcagctttattcaggaatccccatttaaacggcctgggaacaaatcatggaaagggcgccctcaaaaataacatccccgaatccggcaggtacgatgaaatgctgtccctttgataccgggatgccgtttacacttccctcaccgtccaggatgctcacatttgcaaagctgtccccaaaattctccgtgtaacggcctgtggtgtctatcttatccgcggtatagtaagcgcaggtcacaagatgtacttttctaccgctgtccgtctccttcacaactgccggcaaagcgttttggtcctccctaaagggcgcttctatcacatcaatgctctcttttatatggagctgcctgggctttccgtcggacagcctgtcgtaatcgtagacgcggtatgtaatatcgctgctctgctgggtctcaagcaccagggtaccgccctttatggcatggacgcatccgggattaatctggaaaaaatctcccttcctgacaggaatttcacgtatgaaatccttccagcgcttttcctctatcatccgcttaacttcatccctattcccagcatggtgcccaatcacaatggcggcatccgggtcacagtccaggatataccagcattcggtcttgcccagggagccgttctcatgctccgcggcgtatgcgttatccggatggacctgtatgcttaagtcattcctggcatcaataatctttaccagcaatggaaattccctatgacagcctgccgcagccccaaaccactcagggtggctctcccacagggagcttaagctctgtcctttccatgttccgccggcaatacggcaatctccgttcttgtgtgcgctgatggcccagcactctcccgtgcggctgctggggatatcgtaaccgaacacatccttaagacgggtgccgccccagatagcctccttaaaaacaggttccataaatagtaattccctcatgtctctctccttatttttcccctttttgatgcattcaatgcatcttcttacatcataccctgctttttccggttgtcaagaattaaatgggacagggaggggattttccgggcaaagcaatgcccggccccatcctctctcccatcccctgccattgcaggcccctgcggggcgggcagataacggtaatgcttttttaaatacgctctaaccttccaggttttcctctatgcgcagcagctgattgtatttggccacgcggtcagaacggcagggcgcgccggtcttaatctgtcccgcgttgactgccactgcaatgtccgcaatgatggaatcctctgtctcgccggaacggtgggatataatggtgccgaatccggccctcttagccatctcgatagcctcaaagctctctgtcagcgtacctatctgatttaccttcaccaggatggcattgcctgcccccagctcaatgccctttgacagccgctttgtattggtgacgaacaaatcatcccctaccagctggatacggcttcccagctccccggtgagcattttccatccctcccagtcctcctcctggagtccgtcctctatggaacagatgggaaacgcatccacaagacggcggtagtagtccaccatttcccgcgcgctgcggcggatttcctttcccgccatacggctttctcccggaaacaggtacatgccgctggcttcatcatagagctcactggacgccgcgtcaatggcaatcttcatatctgtgcccggcttcaggccgctcttttccatggcccttaccagaaattcaagcactgcctcggagtccttaagatccggcgcaaaaccgccctcatcccccactccggtgctgtagccctcctccttcagaagcttctttaatgtgtgatagacctccgcgcacatcctcagacgctccgcaaagcagcaggccccgtaaggcataatcatgaattcctgcaaatccactgtgttgtccgcgtgttttcctccatttagaatgttcatcatgggaatggggagagcggatgcatggattcctcccagatacctgtaaagaggcatcctaagcccattggcagcagccctggccacagccatggacacgcccagaatagcattggcccccagctttcccttattctccgttccatccgcctccaggagcagacggtctatatgtctctgttccaacgcgctttcaaagaggaccgcctcgcttagcactgtattcacatgctctacagcgctcttaactcccagtccgttgtatcgtttccctccgtcccgaagttccactgcctcgaatttgccggtggatgcgccggagggaacagccgccctgccggtggcgcctcctgtcaggcacacttccacctccaccgtgggattccccctggaatccagtatctctctgccggttaccgcctctatctccagttcgtttaccataaaaaaatgacctcctcatatcaatcttatcattgatataaggatagccattttttaacattatatgtatggaaatccgtctttttattgaccaagcctggctccgtccgcgcccacggtaaatccatccggtgtaaccgtggataccagcatggctcccgacgggtcgcagtaatacagcttatcctcccaggatatccagccggtcttcatatatccctcctggtcaaaaaaataccacttatagttgatattcagccagccgtttgacgggtacgtgccgtctcccttctggtaccaccagccacgatcatccctgagccactggccgttcaccctggtcaggttctcttccgtaatctcgatgtatggggattcctgccagtcgccggcgttgttcctggaatccatggccctgactttaaaatagtaggtgcctgcctttgggaacttgccggaaaaatcgtagctgttttccttcaccgtataggtggcgccgatgccgtcctcattggaattgcctcccctccggcacaggcggaccttataattcttagccaggctcatatcgtcccagtgggccaccccgttatcttcatcccacatcagaccgcttacatccaggtcctcatcatcctcatccagcttgtccagccttaccaccaggaccatttcttccttatcattcttagtggaactggatacatacttaaccgtatcgccggaaaatgaaaacgcactctttcccgatttcttaaagtaatagtcactgtcggcggaaagccatatctctacttttggcttatccccgcctacccagatgtcaccctcatttataatgtccacgctctcaatggaacactccccatcctccagggttacgtccacatttcctccgttttctcctgcctggatacccgatgtgaaattcagtttaattttccccaccggtgtcctttcctcttttgcaaaggctgtaaaggacagcgcgcaggccataatcagagccgctcccgccagcagggcatacgcccctcttttcctcatttgaacctcctccttcccgcttacgtctgttttcctattatagcacatgtcaacgtcttctgtcatcctccggtacaccaaacttgttccattttcatatagtatagtatgccggggtgttaatggacatccggcccataatgaaacagatatacagggggattgcttttgataaccattagtctttgtatgattgtaaaaaatgaggaggctgttctggaacggctcctgaagaccatgtccaatgtggctgatcagattgtaattgtggataccggttccacggaccggacaaaggaaatcgcggcccgctatacggatgaggtctacgattttccgtggacggatgatttcgccgctgccaggaacgccgcctgccaaaaggcggtgatggactactggatgtggatggacgcggacgatgtgatggagcccgaacaggctgcccgtttaatgaaattgaaggaaaacctggacccttccgtggatgtggtgatgatgaaatatctcactgatttcgacgaaaacggaagaacctccttttcctattacagggagcgcctcttaaggaaccacaagggcttccagtggcagggccgggtacatgaagccgtaacccctgccggcagcatcctctatactgatattgaaattcagcaccgtaaggaggccgccggggataaggaccgcaacctgaggatatacgaaaccatgctgaaccagggagaacttctggaacccagacaccagttctactacgccagagagctgtattaccatgaacgctatgaagatgctgtacgggctttcagggcatttctgcaggaaccggagggatgggtggaaaacaagatagatgcctgtctccatctggctctgtgcgaggagcatctagggcatacggaaaaagccatggaagcacttttaaagagtttcttatatgacactccccgcggtgaagcctgctgtgaactgggacggatgaaaatgatggacgaaaaatacaaagaggctgcttactggtatacccaggcattatcgtcccagcccgcggaacagacaggcgcctttgtccggaaggactgttatggtttcctgcccgccattcagctgtgtgtatgctatgaccgtctgggtgactaccgcagggcatggcattatcacctgaaatcacaaaagcttaaacctgaacacccatctgtcaggcagaaccagacctactttgaacgcatattgaaacatccggcggaggggcagtcctccgcacaataaaaaagtctaggagaagttattatgtattttaattttcccaacggaatgaatcgaaatgataatatagaacaacgcagaccatgtggataccccggaaacaacggttttccgggtaatggcggctgccctgacggcaattgtttcccaggttcaggaagatttccggaagatgatttaccgggctgcgacggctgtggcggcgaccgcatgactcagacagataacggatgcccaggtaacggccgttttcccggcggctggccgggacccagaggaccacagagaccagccggaccaacaggcgctcagggggcaatgagacccaggagactcaccggtgagacagggccacgggggcctcagggacctatgggacttccaggacctcagggcatagccggtaatacaggcgccaccggaagccagggcccacagggacctcagggtgcagccgggcctcagggcatccaggggcctcagggacctcagggtgcaaccgggcctcagggcatccaggggcctcagggcatcaccggcgccacaggtcctcagggacctcagggcatcaccggcgccacagggcctcaggggcctcagggcatcaccggcatcaccggcaccaccgggcctcagggacctcagggcatcaccggcaccacagggcctcagggactggccggcgtaaccggcccaatgggcccgaccggacccactggcgccgcggccaccatcaccataggaaccgtaaccacatgcgatcctggcacagaggcaactgtaaccaattcaggcaccacagaagaagccgtctttgacttcgttattccccgcggtaaacccggaggtggaggagccccggaagtcctggctacagtagataccatcacccagcccacttcggctaacggagccctgattttcaatgagaccccgctggtgtccggaaccgccattacccatactgccggttcccccgatgtgccgattacccagaccggcatctatcaggcattcttcaccggcacagccctgattgatgaagggaccaccattccatctacactcacggtgcggctcacgctgaacgaaacccccataaccggagcagtggcacgccacaccttcactgcctccaatgaggaggtaaccctttccatcaatgcgccgttcccggtaaccggcaccggtaccctaaaggttgtaaccagagatgccggatactcctttgagaatgcatccctgactattattcgtctgggtgacagcaccaatatccgcaccaccgcataaccatcagaagtatctattaaccggaaatgttaaggccgccggaaatcatccggcggccttacacaatccgcttatatcattgaagatgccccaaatatcccggcttctctctctatttatttgacagcaattgcctcaatctcgcagagcacgccctttggaagggtcttgacagccacgcagcttctggcaggcttggacacgaaatactttgcgtacacctcattaaacgtgccaaagtcattcatatcggccaggaagcaagtggtcttaaacaccctgtcaaatccagtgccggctgcctccaggattgcccccacgttcttgcagctctgctcggcctgggcagcgattccctctgccacggttccgtctgccggattcacgggaatctgtcctgatgtataaacaaccccgtttacctcatatccctgggaataaggcccaatggcacccggtgctttgtccgtactaagaatattcatctgaaatacctccatatttgtaattgggacaaatgtctccttaatgttatcgcgtccacattcaactgttccttattatatcagatattgccagccgatgcaatacagatacggcaatatatccctaaaaccctgtaaacacccgttcagcatcaccctgtccataatttttatgcaatgccgttcataagcctcatcccaacccatgtatattcataatcaggcgtcccatctatggacattccgcgtcccgtttgctataattgaaatgttttaatcgcattcacatccaacacaccaacaataaatcagaggtatagaaatgacaaatcttaacgatacaggggagtctgttcccgcataccatattgaccatactctttatgagggacgtcccgccgacacatccggacgggaggaaaaggaaatccgcacctacgatttgctggattccctccaggtcccttatgtccgtgtggaccacgacgcccttcccaccattgaagcctgccgcgaggtagaccagcttctgggcacggaaatctgtaaaaaccttttcctgcgcaatgcccagaaaaccgatttttacctgctgctcatgccgggcaataaaaagttcaagacagccgtcctgtccaaacagattggaagcgcccgcctgtcctttggggaagcggaatttatggaatccttcctggatatcactccaggctccgtttcagtcatgggtctgatgaatgacagagaaaaccgcgtcaggcttctgattgacaaggatatactggagggcgaatattttgcgtgtcatccatgcatcaacacttccagcctaaggttcaggacctcggacctgatggaaaaaattcttccggcccttggccatcctcacacggttgtggatttgccatatgcagaataatatacgcgggaagcatgtaaaagctttcatcggataggggagattttaacctccccttccacaccacgtagcgtaccgttcggtactacgcggttcaatagtttactcggactttcagatagtgggcagtcatatcgggataaccaagtctgtccactatgattcttttggtgagtgccgagttgagcattcccgccgctctccacactccctttcggcagttcgccatctcatgcaccttccactctggtaaatgtaacgcccgcaacattttatatcttgtgcgtaccttcttccattgtttccagtacaccgctcggattctgtggcgcagccactcatccgtctgttccatcaggcttttcatgtctgcatatcgataatagttaatccatccccttgcatagcttcggagtttttcttccctctcctgattgctccatttgttccctctggttgtcagctcccgtatccggttcttcatttttgccaccgacttcgggtgtatcctcatgcggcatttccctttatgccggtaaaagccgtagcccaggtattttatcttgctgacgtggctctctgtcgttttctgaagattgactttcagaaacacttttcctgtgatgaatggcacaatgttttccatcgtcctctctgcgcttttcctgcttttgcacagaatcaggcagtcatccgcatacctcacatacttgtgtcccctgcgctccagttccttgtccaactcattcagcatgacatttccacataagggacttagcgggcctccctgcggcacgccctcggtcgttgcgtgaaatcctccgtcctccattactccggctttcaggtacttgtgtatcagcgagattaccctcccgtccttcaccgtcctcgacagcacctctatcagcttgctgtggttcaccgtgtcaaagtaggattgtaaatccatgctgaccacgtagacatatccttcgttgatatatttcctacatctttccagtgcgtcatgcgcccctctgccgggacggaatccgatgctgttgtcagagaactgttcttcatataagggcgtcagttcctgtgcgattgcctgttggattaccctgtctaccactgtgggtatccccagtttccttgtttttcctttctcctctttgggtatttctacccttcggactgggtttggcttgtatttgccttccctcacctgctcgaccaattcggactggtgttctctcaggtagggtagaagttcatccacctgcattccgtcaatcccaccaacgcctttgttcgttttgaccttcttataggcggcatttagattgtcgcttctaagaatcgtatctagcaggttgtccgtccgaaagtccgtgttggtgtcggggttcccggtaatcctttcatgggcgtactctcctgtttcccttccctgttccgcaggtatctctcgcaggtagtcctcaatatgaagttgtctgtacttaattccatgtccggtttccatttggtaacgacacctcctactgttcagtccttcccggtgcgtttgcgaccgcccggtactatgacctctgctgacttctcacggcaagctttactccgtgacagcgaatgttttatcgccactttcacgtccgtgagacctccccgggtactcacacgttctttcccacttatacctgccccgtttactgctggcgttccgtgcagttattggactttagtttgttaggcaacctcatccacgcttcacagcctatccggacaacttttacaggccagtggtttgcctccggcttccttcagaccccacctcacgatgacgcccttgccattggctgcacccttcccactgccgggcgggtcagggactttcacccgttagaacgtgcgcccgccgggcgcacccaaaaaagagctggcagccctcacagactgtcagctctttccaaatctagtacctgcagtactccttacggataccttccatctcctcgtggatggccggaacatccatgaccatctccatcattcccacctgttcctcataaacagctgggtctgtctcagctttcacttcatcctcgcagatatgatatacacttagtcccaactggactcctgccaaaggacctgcataagttggatcgccggccgtaacggtttctgccgcaaggcctgcggcctctgcttcagcagctcccagaagaactactatgttctccgggccgtgctcctcacttatgtttaaaaccctcttctggttttccagatccatggcacctgcggacgttcagacaaagcactctgttgaagagtaggctatctttgcgcctgctgtcttggcacactcttcgatggctggtccgggtacaccgtcgcggtcaccaatgatgatagcatacttgtctttcagtatagccatacattgctcctccttttctttatcgcgcttatatgcgctgtttttatacatcagccgcgtctgcggttatgcatcatttgtaccggccctccggccatgcccgggcatcaggcatatttcttaatcatttcctcgcagctctccggggtggcgtcatcctttaccctggaatcaatcatttccccatccttgtaaatagcaatcacaggcagtcccagcaccttctgggcaatggcaagccgtctggccttggtggtgttcagggaacagaattttacagttgttccgtacacctcctcgaacttgtggatatgcggcatcagagccgcacagggaacacagccgtccccgtagaagtccaccagcacatagccccgggcctttaaaacctcttcctcgaaattttccttggtcaaatcaatcattttttacctcctaaatgtaatcgtgataacttatggttaaatagtttctttttatccatttccaaaaagccgggcttttacctgcgtttgtccttgacaaaacatggaaaacagataatatattaagttagtagctaaaaaactttcatccaatgataaggagtatcaccgatgagcgatataaaactgactgaactgacaggttcctgcggcggctgagcgtccaagatagggcctgataccctcgcgcaggttctgcgcggtttaccaacctttcacgacgaccggcttctggttggatatgacacctccgacgatgcggccgtctatcagcttacccctgaacttgccctgatacagaccgtggatatcttccccccagccgtggacgatgcctatgagtacggtcagattgctgccgccaactccctgtccgacgtatgggccatgggcggggaagccagactgtgcatgaacatcctcatgttcccggagcaccttccctttgatacggtacaggccatcctccggggcggctatgacaaagcagctgaggccgaagccatagtagtgggaggccataccatcaaggacgacattcccaaatacggcctgtgcgtttccggcgtggtccatccggaccgtatcctgcgcaataactccatccaaaagggcgatgttctgattctcaccaaacccctgggcaccggcgttctgaccaacgcggacagaggcggtcttttatctgacgcagagcataaagccatggttgactgtatggctgcgctgaataaatatgcagccgatgcggtacgcagcctggacggggtccatgcctgcaccgatgtgaccggcttctcactgctgggccacagctacgagatgtgcggggaatccggacttaccgtaatcatagacagcagccgagtcccactgctcccgggcgcggacaactacgcgtccatgggtcttgtgcccgcggtggcttaccagaatatgaagcacctgaaggacaaggtggctctgccaaaggaccttccgtcccatgtacacgaccttctcttcgacccccagacttccggcggcctcctgtacagtgtggcatcccaggaagcgggacgtatcatggaagcgcttcagaaagcatgccagaccccggctgtcataggccatgtggaaggcccgtcttcccatccggtcatggtgatttgacaaaaacttcacaagaaggaggcagacctctcatcccagctttacaaaccgggagcggacagcctgcccccttccactctgctatacttgccacatctgatacatttttaaatatccttacagcagaccagaaggccgctgaggaattttctgaccctcacgttgccgtgtccgtcgctcttccctctgatatagctcatttcccttttgatctgttccagactgtaaagcctggctccatattcattaaacacgggatctgcataatcatccattcctctgtatgccagattcgccatacccacagaggccgcgcgccgtatgcgctgttccacgctcttggaattctgtcccatcctgctgcacagctcacgtaccgtaatgtctcttatgtccaggtcctcttcaatcagatagcggacaattcgtatgatgtccttgcttcccgcctcactgagtattccgatttcctgtaagatgccttttaaacgccgtatggactggttataatccgtttcctgttcctcaggccgcctctttcgtccctgcacatttgcttcccaggaaaatgctcccgcggaaaaatcgttcctggccttgccaatcagccactgcatggccctggccatctccatattgtgcagtacgtttctcacttctatctcattgtacggtttatgtatcaaaagctctgcgcctttttcataagccatcctgataatatccatatcattgaaatgcgaaaggataacaaccgatgtctggggcagtatctccctgattttctgtatgtatgcaatggttttggatgcggaaagggtaaggtctgccagaatcatatccgggcacatctcctggagctccagataggcttcctcccacctggacgcaatgccggcaacagttcccataccgccgtcctcaatcattgttttcagttctgtccgcgaattcctgtcgcagtccacaatatagattctcatcctatttcttctttaaaaatacatccttaatatttttccacaacatgaacagtatcagtactgcgcccacatatccgttgagcacgtagatgatgttgaccaggaccctgaaaggaaggaagagtcctacaatcagtccaaccactccaagagcaactgtcagcatcttaaactggccggttccctcttttgcgaacctggcgcatgggttatacaataaaggcaccgctgttgtataaataccggcaaacaccactaccgcaaagaaggatgcaaatggtttccagatgcgctctgccaaaatcaggttggggatatcagcattccatacaaagatgccggaattgcttaatcctgctgtattgatattggcaacctgtgccagcatgataaggatgatggcaacacatacggcaatagtgcctccataaatgccgtattccacgtctttctttttattattagctcccaatgccgctgtaaagctggcgaaccacagaagtacgaatcccgcataagacagggctgatatcacccagttaggtcccgcgttcttgatggtttctccgcctgcctcggcaaaggcacctgtacggatgatttccagtccggcgcccacattccccgcatccctgaacagggttaccacgccgataccgatacagagtacaacgatagccgggccaaccacaccgatcttgtcaaccagtgagttaagtccccctaccacggtaaagattgccagtgctgtcagaagcacgccgcctgcccaggaaggaagaccgtactgctggttcagtgtagaggcagcacctccaaccataacgaaaaatgacatgtaacagaatacagtagaataataatccatgaaggtcccgacgtatttaccgcagtaaaacttgtatacgtcatttcctttttcaaagtgctcttccgctccggccttggcaaaattgtaattgtagtagatgaagcagaccgcaaacagtaataccgtaaaaattccctgcacgccatatgcagtgtagtactggacaatctcctgccctgttgcaaacccggaaccaatggtaaacgcgatgattgctccggcaagtataactacccgtccccagttaactttcttatcactatccatacgccttctcctatccatggtctgatacagcgccgcaacgctgtcctgatttatgccggcgcagcgggcaggctgcctgctgcgccggatttgtcatttctgtgattatttctcaaacacagtctggccatcaactggtgtctgaagtgctttgagagctcttctgaccatggataagcgtagcttatagctgtccttctcgccctgtggcggatcgcccagaggataaggaatgcctataccgggaataatacggttagcgcctattgtcagtgaaatcggaactacagtagccatgtgaactaccggaatgccgtacttctcgatacccttaaccatcgttgcaccgcaacgagtacaggtacctcatgtagagacgaggataacagcatccacatgctcatcaataaacatctgtccaatctcgctgccgaacttggctgcagaagcagtcgctgttccggtaccggtagtagtgcagaagtagttcacaagctcgccgaactcgcctgctttttccagttctcttaatgcgtccaacggaactaccacgttggggttggccatggcaaactgacggtcatatccgccgtggatggtggtaaactcatccggcgacagacggtccatgccggtgatgtcgtatttgccccacttggtggcgttggaggactcgatatggtcagggttgccggttggcacgataccgccggaggtaaccactgcaatttttgcgtgcttaatatccttaacaggctcagcgggcgcaactctgtcaaacttaggcataggaaggtctgtgccgtattcctcgccctttaacttcttaaccagcatctcaagggcacgctcagaacctctcttctcagcgaagtagttcacgcggattcctctctcgatgtatccttcttccttcggtccaaggattttagcgcctgccgccatcttcttaatgagggctgacataacaggaagtacctttggcatacctgctgcggagttaggtgtttccacaatgataaggtccttgcggaacatatccacgcctggattctcgatatacataccggtgataaccgggatgcccagacgctcttccactgccttacagatggtaccgcaggcaacgccgtaacgtccagcattgaatgcggggcctgccacgaatacatcaggctcacatttctttaccatctcaatgatggtatcggttgcagcgtccagattctctccgaaatagttgtcaccgcagataacggttgatacgatttcataatcctctcccagtgcagccttaagtcccttacctggtcctacgaccccttcccgaagctcaggggtataatcggctttttcttcaccgccgattccggcaaagaactggttaatataatgtactattttatatttagccatctttccatctcctttattttcgattaatagcctctagctgccagcttgttgaaaccattggcaatggtggaggcgatgataatctgaagctctgcctcaaagctgccgtccgggttcttacagccgtcccagccgccaatctgcatctcgatgaagtcctgtgttccgatgaccttatccatggccgggaactggagtgtggcattaccctgtccacaggatgccagtgcgtcggcttcctcgcaaacgtctgccagggactgggactttccgtccttgcccgggaactcgtcggttatcagaaccaccttggttcctgcgcgctctaccttgcggcagttcatcatcaggtcggtatcaggattgccgtatccctcctcggtaatcagcacaccgtctaatcccatccagttgcacagcttggcaaccatgtcggaatgacgctctttgtctgccaggaatacgttctcattggtcaggataacacccatgaagttgatatccttgccatggtgcttatagcagtcctcaataaccggattgtggaaatgatggtaagtggtaaccttgtcacacggggcaacacagttaccggaaacaatagcgccgtccatgatttccgttggatacataaaggtggggatgaactgctttgcatccacgccgtaataatatgtatcatgcagaaggccctgtgactgcagcatgtgaatgtagcctacctttggaaggtccggatacatggcagcctgctcgaaaatgggctttgtctcataagtaatgatttcatcaggctccagctctcttgctgcctcgcctacataagcagctacttttaagcctgccatacgggcagccttctcatatacatgagtctccaggccgtcggccggctccactacaacgcagaggttataggtctgtgagaatgggcagtaatccgcagcagggccgctcatgtcgataacgccctcctggaatcctacgattttaccaacagtcaccacacagcagccttccagtgcgtgtgttcttccggttcccacctgcgggcttacctttccgatcacgcctgggaaaatctctccgccgctgaccttaacccttggctcaatcacgtccttaaccggtgtaatcctaacggactcacctggctttgcaatgtcaacgtggcagccggtcagcttatcgtcttccagcacaagcttttcaacttcctctttgttgacatagagcactccgtctttcacgtgagtcttgtcatcgaatcggatatctttgataaagatttttcccaattcaagcttcatatgaaatacctccacttctttatattttactgcctgattgtccatgatatttccatatatctaacctggcagccacagcagtactctttcggttacaaaatttggggattgtgcaaaaatgatatttaaaaatagtaatcgcgataacttatgtctataatataacataagttatcgcgataatcaatggaactcttgacgcctattgttattttctgtaggaatagtttttttcgtcaatttgttataaatttgtcatgttttttgtgtatattcactacttgggtgtgaaatcataggcatagcactgtgtgatttccttgctctcctgaatgaactggtttaccagctccggaatctcttcctgactgacgccgtgctcctggacaaacttaaaatatcccagaaacagggtgcatatgatatgattcagcttttttgcattttcctctgaaattttgccctcagccaccagaagcctgcatatataataatccctctggtaatagctgggtatctcaagcatctccttgatgaaggggctaacctgtatgatggcatccggaaacatctcatagtattccttaagggcctctcccaggtcccggttgatgttccggtagaatacagcctcaaaagcctggggctttttaaatgcttcctttgcataggaacgccatatgccgaaatgcacgtcccagatatcattccaatccttctcacattttgacaaatccaggatatactcgttgagcgcatccagctgggcataaaacaaaagctcatccaggttctgaaaataccggtacatactggcggatgaacatcccagctctgccgcaatacgccggatgctgatggcctccactccctccttctttataattctgctggcctgaaccacataatccttcctgctcaaatctttaaagtaggatgttcccacattctttttcatgacttcctcacattcggttccttattatccctataatttagggattacattctctatcattgacaaatcaatggtcttgtaatcgtaggcaatcttctcatcatacttaggcaccttcttaatggcggtccacttattgaacgcctctatggcttcctcaatcagacggatatcccccgcgtcactctttccggtttcactgtataaaaggatggtcctgtagggcgtctgattgggctttaaactggaggcctgggggtgggtcagaagcttgtggtttgtatgaatcaaatccctggtctttaacagtacctcctcgtaggtctccaccggaacaacctggtctaccttgtctccccatttttctgctgcccggtcattattggtgaccagaatacatttacctaaatcaaacattgtatcccctcctggttattattatttgctgtcttccttaacatctctttaatatattacatcaaattacatattccgtcaatttatcccgtacaccataaacccatgctttcctaaattatatctgtaaaaatgcaaatcccgtaaaaagtgctgcaaagccatcgaaatccttcaattgctgttgcagcaccctgagtcaaaagaaatattcatatgggtagttccgtgaacactatttgctgaaatatccgtgatacagctggaaaaagttgtccgccgtgcagccctcaccgccggagaactccaccacgtcaccgggcagcttcttaagcttcaccgtgtgttcctttacgtagggctcatagattcccaggaacgcctttgtcttcttctcctgggccagcctgctctttctggcagccgtggcctcctggtcataggcattgacacacttctggatataatatcttccgccctgctccagtatcccgctgacctggtcctgctccagctcaaatgcagcactgtcaaggccatccatgtccttctgccattccagtgtcctgtctgtccggctgttctttgaatattttgcggcaatggctccaaaatccgctttttctgcctgggtaagggccagcacgttctctgcttcctccctggaatccagttcaatctgctggatgcctattacctttgcctccgcgtcactgacctccaggttctcgttttttgtcagctccgccaccagcttatccgcgcggtagtattcgcagtacaggtcatacacctcgtcctgggatacatccataaacctgcgatcctgctccgataaatttctgtaatattcctgggcaagggacttaagggcatccctttcctggcttgtaagttcaattccctgttcatccgccatcagattggtggttgccagctcaatcaggaactgctccacctggcccatcagcttatcctcaaatgtattgccgctctcgtccgccttcacagaccacagttcgctggtatatatgttctggtaccggttgcgctctgtgatggcaataaccatcatctgccccctggtgtactccttatccacggttctggagccggttgctgcagctgtcttcctggaacacccggtaaaaacagtcagtgccaggaccgctgccaggcacagtgtcaaggtccttttccatctcttcccccgtcccttgtatatcctgcttctgtccactgtcacgctcctctcacagcagccctttcagtatcttgaggactccgccccgcacattgctgtccgcctggaatctggctgccctgcggacctcttccctggcattggcaaccgcaaagctgtaataggcctggttcagcatctctatatcgttgagctggtccccgaaggccatggtctcctccaccttaatgcccaggctctcctgtatggtgcgcacggccctgcccttgttcacatccctggccatacagtccatccacatgtcaccggcgcaggccatcttggcctggtccctaaactcctcatatatgtccctggtggctgcctcgattccctccttcttataaatggaaatcttcacacatggctcctccagctccagcacgtcccttacccggataacattaaacttatagccattggtcagccagtcgtacagggcatcgttcttagaatccagataatccccgttcacaccggcataaaccatctccagctccggatgcatacgtaccttccggatgatacggtgggccagctggcggtccatggtgtaggcatacaggcatctgccgtggcagcccacgtacgccccattgttggcaacatagaatatcttcttctttaccggctcaaacgcgctttccacactggcccaggggcgtccgctggcaaccacaaactgcattcccttttcacgaagcctgagaataatgtcaaatacctccggatccaaatccggggatccgtccggtacaagggttccatccacatccgatacaatcagcttaatcatcttccctgtcctccaaaagtctttttatctcctgatagagacgtcccacgggcagtcccaccacgttggcgtagtccccgtcaattccttttatataggcggcaaacctgccctgaattccgtaggcccccgccttatccaggggctcaccgcactgggcatactccttcatttccccacaggtcatagggtatacatggacatccgtgcgctccgcaaatgtaatcccatggcacctgtccttcccctggcacagcaacaccgtcacaccggtgtatacctgatgggtcctgccctgaatcttctccagcatctcataagccctcatgggagttcccggctttcccagtatctcatttcccacggaaaccactgtatcagccccgatcaccatggtgcccacgggacatcccgacgcaacgtcctccgccttctgtctggacagctccatgaccaccatatccggcttcttctccctggtttcctcctccatccggctgggcctgatttcaggctccaggccaatctgtgccagcagttccttccgtctgggggatgccgaggccagcacgacctgatatcctccccaagtatgtctcatatccatgtctttctcctttattcaacccgccgtaaaacaggggcggctcaaaacgacgaaaagactgctgcatgtagaccaatggtaacagccacctgcagcagcctttcatccaattaatatatcttcagccggcccactgccggcgcatcttcatcttccataccgcccaggcgcaggcgaaaacagcggatgaaatccaccagatagaacatggtaagtcctaccgccaaaacgggccctacatggccgggcaggctgaacacggcagcacgaacccttatatccagaaaataaaagaaaaacagacccaaaagtccccacccgaggctgctttccagacagatcattcctttgtaattaaagggtttgcggctgtagtcccaccagaaggaaccgaacagccggaccataatattggctgtgaccagttccatggtagtagccatggccatggacgccgtgtagagctccatggggctgcccgaaacgggccgcagcagcatgcaggcgcccagggcgccgaacccatatatgacgcaaaaggggccatggccaaagccacggtccactacaggccgcttatattctgcactcagcacaatacattccagcaggtaaccaagaaaactatacataaaaaaccagttgatgaaatcataaacattcatggtatcttctgtccttcctgtctaacatgataccccccgccgtgttaatagcaggaattcagggccagagccagcccgattcccaatatagcccctgccagaacctgcaaaggcgtgtgtcccacgtactccttaagcttctcctgaagcacttccgcattgagcttaaggggattctctgaaaggatggaattcagcagcttggcctgttttccggtctcacgcctcactccgatggcatcatacatgacaatcatggagagcacgaaggacacggcaaattcaaaggagccggccccgtatttaagcagggccgctgtggtcaggccgcagaccgtggcagagtgggaactgggcatgccgcctgaccccaccaggcgctccgcgttaaaattcttattcaaagcaaagtcaatcagtgtctttaagaactgggcaaccacccatcctgtaacggcactcataagaagctgattgccaagcatctgtgtccatacattcataatcggattattctttcccctttcaaacgggctccgggacggttttagcaaaacgtatgattaccgtctggccggctgcgcaaacaggcacatccgaatccagtgcttaaaccgggccgtggcttccactgtactgcaatatttatccgcgcaagtaactgcatatcctgccttggatgcgggagggacaagggtcaggggccacatatgcctcaggattatcatccgttcctccccggtcagccggaaataccggtctgcattcgccagggctgctttcgggtgggtaaatccatgaaaatactggcccgtctccttagcatgggtatgccaatcgtataaaaacaaatcatggagaagccctgcccgagcagcgcttctccagtttcctcccagctgtttgcacagcttatatccaaggtatgaaacctgcatacagtgggtcttgcatgtggtagtcccgtgctgtatgtactggtccatggactggaatacaggatggcacagtatgtctcttacgcactccatgtattcctcgtcttctgttatctctgaaaccactgacggctccatatgggcatcacacctttcttaattcatcagcatattatccgacattacaggtctgttgtcaatatccaatcagccagtcataaagttcctggtacttggcggcagaggtccaccaggaataatccttggccatagccctgtcgataatcttattccactcccggcgtttgctgctgtagacatacttggcatagcgcacgcttcccagcatctcatgagcattgtaattggcaaaggagaatcctgtgcccgtgctctcgtattcattataaggctccactgtatccttaagaccgcctgtctccctgacaatgggaaccgtgccgtaacgcagagccatcagctggctcaagccgcatggctcaaacagggaaggcataaggaatgcgtcgcttgctgcgtaaatcttatgggacatggcctctgagtagtagatctgggccgatacccggtcatgatacttccagtcatagtggcggaacatgttctcatagcgctcctcacctgttcccagtaccaccagctgcaaatcatcgttgcacagctcatccatgacgcactgaatcaggtcaaagcccttctggtccgtaagacgggagacgatgccgaccataaacgtcttctcatccaccggaaggcctaactcctgctgaagcgccttcttgtcctttaccttttccttgcggaaattcttagcattataggtctgggcaatatacgtatctgtctccggattaaactcatcgtagtcaatgccgtttacaattcccctgaggcttccggccctagaacgcataaggccgtccagtccctcgccgtagaatggcagcttaatctcttctgcataagtgttgctgaccgtggtgatggcatctgcatatacgataccgccttttaacaggtttccgtccttgtaggcttccagcttatccggcgcgaaataataatccggcagttctgtaaagcgcttgatggttttcacatcccacacaccctggaacttcaggttgtggatggtgattacagacttcatattgcagaaaaattctccctcgtggaacttatccttgagaagaacaggaatcagtcctgtctgccagtcatgacagtgcaccacatcgggccggaatccaatcacaggcagagctgataaggctgcccggcagaagaagcagaacttctccaaatcccaataccaatccccgtatggctttgccccgttaaaataactctcattatcaataaagtaaaaggttataccctcgtgtacgtactgcaggatgcccacatagcggctctgtcccagataatccatatagaagtggtttacatattccatcttgtcacgccactcctgtttgatgcaaaggtacttgggaatgatgaccctgacatcaaaatactctttatcaaagcattttggcagggagcccactacgtctgccagtcctcctgttttaataaacggcactgcttctgaagctgcaaataatattttcttcatcaaaacctccctctcctgacgaacaggttccatatgcctttcttaatagtataccttacttttccgaaattaggaagttctttctgatgaatttgtcttaaatttttttgtattccaagagtattttatccgatatcagcgcaatgaattcagaattggtaggcttaccctttccggtactgattgtataaccgaaaacttcatcgatggtttccatcttgcctctgccccaggccacctcgatggcatgacgtatggcacgttccacccggctggccgttgtctggttgcgtttggctatggccggatagaggattttcgtcacgctgctcatcatttcctggtcttccaccgacatggcgatagcatctctcagatactgatatcctttaatgtgggccggtatgcccagctcatgaagcatctttgtaatgtctgtttccagatgctccttcatgtactcctccctggtgatatgggattcttcccccggctcaaaaggagccgttaatacttttcctgccggctgtttatcgggcagttttccaatatgacgaatcttgtttaccaggatttccttgtcgaagggtttcatcagatagtaattagctcccgccttaaaggcatcttctgtcatctgttctccacccactgcactaagtataattcttaaggaaagtatcagattcagagcgacaaaaaaatgaacagcttatgcaaaagataaactgctctgaatgtgattctttccaattgtaccaagtcgcggaactttagccataggctgtatggggatagtatttccccagggaagcttaaaatagtggattatggtggtctgcaatgcagaagcaggacgattttagctgtatcccatatttttgggtatgcttcgcagacctcccgatggcaggtcttaaaaaatatataggaaagcagcctgtcaggaagaaggaacatgacaccttcccagctgtttcatggctgtatgaccacattcaggacacacacagatatcgaaattccagactgcttttaaaagctctgccagggacattccggcgtaacgctgcttgaaacgctgtccattctgaagcttaaagataaccttcagattcttatatttcatccgattgttcagaaaaccataatagcgtattttctgaaagccggaaggcagcacatgcatcaggtaacggcgtataaactccgtgttgccaagagtaatctgacgttttggttcacccggcttttttccacgggcagagaatgttaccgtatcttccgtaacagaaaggatcctgctgttagagatggcgattttgtggatgtagcgtccaaggtattcaatgacattgccgaagccgttgaaggttttcttgatgtaggggcaccagtccatttcataaagcttatttttaaattccttccagtggtaagaattacgcaggttttcacaggaggatgaaaagttaagggagccgctttcataaagggagacaaggtgtgccatatatttccccttaaacttatcccgcaggacctccgtacggataaaaaacttagatgaggatttacggatttttccatctccggtaagcccgccgccggaaacaatgcagtgcatatgtacatggtaatccagctcctgattccaagtatgaagtacttggataatcccgggtgttgccccgagccacttcttatcagcagataattccagaagtgtttcggcgcagcatctgtgaagaagtccatacagaagcttctggttgcagtaaatgaggggatttaattcatgtggaagtgtaaacactacatgaaaatagggtgaatcaatgacctcagcactgcgtttatctacccagatttctttcttcacagcctgacagttggggcagttgcggttgcggcaggaattattgtggacttccacatgcccacagtcggtacactgacttaagttgacaccaagccttccggatttgcagtttaagatggctcgggcggctttgcgttggacatccgactgatagtgccccggtgctgagaaagcttcataggactgctcaaatatctgcctgattttgtaatcactcatggtattcacctgccaatcggtcaaaagggctgacggcattgcggatggcattaccggaaagatggacataaatagtggtggaagacaaagatttatgtcccataagcgcttttatggtaagcaggtcggttccgttttcatacagatgggtaccaaaagcatgacgaaaggaatgacaggtaagcctgcgttcccatccgagcctgtcctcatgggcatggatgtgtcttgaaaggaagaatgtgtcgatgggtctgtcctcgccactttgctttggaaaaagaaagccttttggtctgccgtattcaaaccagtagcgtgtcagcaggtcaagtgccgctttagaaagaatggcatagcggtcattcctgtttttggagtgtgtgatgtgaagccgcatgtttttgcggtcaacatcctcgtaacgcagacggcatacttcaccgatacgaagccctgaggaatacatgagtgtaaccatagtcttctgctttaaatcaggtatggaagaaataaactgccatgtttcctgtttcgagggaacatagggaaggtactcgtcaaacttacgcatgggaagctgtgtgtcatcccatgttttgtgaagaacatacatggtgaaaaagcgcagttgtgaaatggcacagttgatggtgcggtcagaaaggtctctggatttctgtagccatttgatgtagtcacgaagttcatcccaggaaacatcttctggcgatttgtgaagaacatttgcgaggtaatccagatacgcccggatgtaagtacagtaatttttaagggtatggtcggtaagaccgcgaagggaaatcatttccctgaaagaatttaaatatttgtccatagtaaaatctcctttgaaatgcaataaaaacagtagttacatttcaaaaagaggtggtggacgagtaaaaaaataagatatatagttgttgagtttagaaatccatgataacataagcatagcagttcttaaagttatgaagttgtttggtgtggtaacttaacaatacatcataaatttaaaaactgctattttttataaaaaaagtggtggttttatgtaccttgggctagccgtcgcactagcgacttggtacaatgaatgcaggatttttcaggaaagtatgctcgcttttcactttttccactacggatataccgtcaattttcggcattaccaaatccagcagtacaatgtccggcgtggtgtcaacaatcatgttaatggcatcagcgccattgtctgcctttccaattacagataatccgtcttctgcgttaatcagttcatccagcgtattcagaatcagcggattgtcatcgacaatcgcaacattcagcttttccacttccttttacctcctaaaattgtttgcctgtgctgaactacctgccaatcaatcggtagctgctattcgaccatcttaacatcaaatccatctccttcgtcaatataactcctggcgaaattaattatatatggtccccataccatatagcaacgattcgtggtcgcaattttagacacgcatcgagattaaattgtatcatttttggtgtcattttgcaattattaattatatcgattaacatttttgtaacaaataattggtttttttacaatattttactttaattcgacaccttttttgtaatttcagcacgttgaggttctaatccattatattctcacaggcttgattatagaacgcaaacatctctgtttttcctcctgatatttaaaactttggcaaaaccgcgggagggggcgagacgggatttgtcgaaatttgttggagagggtaggttgacggaggtggggaggttgggacagaggtgagagcagagataagggccgaaaaaaaaacagggatgatatttatgaatttgataagatatgacagatggggaacggattttgtaagaaatttgcagaaactgattttgaggtggtatctgcaagccgaagcgtatgaaatatcaatccacagcttcttcgcagaagccgacgcaaatacatccaataccgcttcatatatcattgattttttgtatgtatttcataatcatattccactattttacagtttttatccatattcccccagattgtccctaaaagctgccagaaaacagttgcaaatctctcctgcttttcatgttcacttgacattcgcactactatatagtccactttgtgctgatatatcaccttctccacatctacccgtgtttttatcttagcaaatcttaaaatattattttgatggcatacttcacttatcataatttacacctgccctatcctttgtgttgctttctgtatatataccacccccccccccccaaaaaaaaaaaaaaaaaaacggtttgtctatattataccatattctgcccaaaagagtacctttattttaatgcagccagctaccgcgccatcgcggaccaagccggtaaagatagcagatgtaagcagccttacaacgctatctttcctgacattttctccgaaactcattgctccatcatattctcaatcaatatcccataccccctgctggcatcctgcacaaacacatgggtcaccgccccggccagcttcccatcctgtataatcgggcttccgctcattccctgaacaattccacctgtcagctccagcagttccgggtccgttaccttgatgaccatgcttttgtttttatgtccggaattgtaatccaccttttgaatctcgatggcataatcctttagctcacctgaaatattgctgcggatataggccggtccctgctttacatcctggcggcaggcgatttccatgggctctcctgaaatctgctttttaaactgctggttgacggtgccgaatataccctcatttgtattcttttcaatatctcccatatgggactggggaccgtagtaaattacgccggacagcagtccgggttttcccatggatcccttttcgattcccatgatttccgtggaatacagtgctccctccgaggattccaccaaatcccctgtatcgctgtcgctgattccatggcccagcgcgccgaacctgccgttcatatccacataagtaatagtaccgataccctgggtatcgtccctaacccatgctcccagcttgtactgcccgtcagcgccctggaccggcttcagacttacatccacgtcctcgccttccctgcgcacctggagcacgcattcctggccgcctgactcgctgacagcccgtatcagatcctcctttgtgttcatgggctttccgttgaatgcctcgatatagtcacctgatttcagtattccgtatgccggttccacctccatgccgtcgcttcccgttatgcgtccggttccgatgaccatgacgccgtctgatttcaggtagattccgatgggagaaccgcagggaacagcatatctggtgtccaccacatccacctgtatgtcctttaattttatcactccaaacagcttaagacctacctggtagcttcccttttctcccccgaacatggaaaaatggtccctgccgcttatggtaatctgatccgccggtatattgctctcatttgccagggccacctcctggctgtcgctggatatggttgcctttaaaggcaggccgaaggaaaattcctcctcttcattttctataatactcacccggtccggcactgcctggtccatgtaataccatgtgtaccccgtaacagccacagcggacagccagaagatgcgccccagccaccggtaaaagattgatttccccttcatcgccctgcctccttatatagtcattcattttaaatgggtcaatacactgccttggttcctccggttacggccgaaccacaacaaaaaaagaaagaagcaatgttcactgcctctttcttagtattatccatccttaggatttcaatctgttttattttgttctgtctgccaattccttcatttcacctgcgtttttaagcactgcctccgtaatcctggcgccgcctaacagcctggccagctcttctacggaagcctttcggtccagcagacggatggtggtaatggtcctgccctggctggcagattttgcaatttcaaaatgtgaatccgccatggccgctatctgcggcaggtgggtgatgcagatgatctggtggctccttgctatgagcatgagcttctctgataccttttgggcggtacggccgctgataccagtgtctatctcgtcaaaaatcagagtgggtatatcatctgaatccgccagcacggtcttgatggccagcatgattctggaaagctctcctcctgacgccacatccttaagagggcgcataggctgtcctggattggttgaaataagaaactgcgccccgtcccatccggatggtgtaaaatgatccagtttttcaaattccatgtcaaattccacgtccaggaaattcaaatccaccaaaccctgcctgattttttttacaagcgtcccggacgcctttttacgtatccctgttaattgtgtgcagagtttctccaaaccattcctgcattcctctaattcctgctccatacgctttctgtgggcgtcataatcttccaattcttccagccttttctttttttgttccagcttctggcggatggcttccacggttgccccgtattttgcctgaaggttatgtatcaggtccaggcgttcctcggttttcctgaatgtttcctcgtccatctccatggaatccaggtaggtggacatctctcttcccgcgtccctcagtatggaatccgcatcatagagctggtcccggatgccgcccagggtctcatcgtactctgccgcctgctccacctcttttaaggcccttgaaagccattctccctccactgcctcgcaggcggctcccagacactctgcaatgcgcctggaatgggaataacggcggtaaattgaggtgagctcctcctcctccccttccttcagggctgatgcctctatctcctctatctcaaaccgaaggaagtcagcctcgcggatacggctttcagcatccatatcaaaccccctcagcttttcttcaagggagcggtatatacggtacctgtctgctattgtctgttttacaggctgggtcgcggccttgacataggcgtccagaatttcaagatgcttggatttgtaaagaagggactgatgctcatgctgcccgtgtatgtccagcagcaggcctgtaatctggctcagtctggccatggtcactgtctcatcgttgatacggctgatactcctggcaggggtcagcttcctggatatgattaccagtccgtcctccgtgggttccacctccagctccctgagagccttccgcttctcttcccctgtggcggaaaacaccagctcaatataggcgtagtcagcccctggacgtatactgcctttgggcgccttgccgcccagggccatggttacggaaccgatgatgatggattttccggctccggtttcaccggtgaggatattgagaccctcaccgaattccacatccgctttctcaataagggccaggttctttacatgcagttccagtaacatattacaccccttttccattagtcttccaccattttcttgattttctccatgacaatgatggtgtcgtccacactgcgtatggcgcacatgatggtgtcatcacccgcaatacaacccacgatttcgtggaattggatggcgtctagggcagcagccacagccatggccatgccggatacggtcttgattaccaggatattctgcgccatgtccatggacatgtatccgtccttaaggatgcggatatatttgatggcggatgtccctctggggctctccaataccatgtagcgctgtctgccgctctctgactgcatcttggtcagcttcagctcgcggatatccctggaaacagttgcctgggtcacattgaaaccagcctcattcagcctttcagccagctcctcctgtgtctctatctcatattttccaattaattcgacaatcttgctgtggcgctctaccttcatgtgagacgcttccctccttgttgatttataatgaactgcggaccctgctgtctatattcctcccagatggttgctgaggttctgcataaatgatatctgctttaactttatcatcactgtctgcagttcggaacaccgtatgtctatacagtctcctgcctttaattccatggacgtatccccgtcaaaggatacgacctgaccgctgttaaggaccttaatccgaaccttgtcctccggtgccagcacaatgctcctggcattgagggagtgggaacagataggtgtcagcaccatcatcctggctcccggcgctatgaccgggcctcccgccgaaagattatacgccgtggaaccggtaggcgtggctaccaggacaccgtctgccgcgtattcattgagatactcgtcatttacatagacgctgtagcgaagcaccttcagaggatcctttctggtaatggcaatctcattgagtgcaatatcctttaaaagggtctcttccttccgccgcgctgtcccgtgtatcatcatccgccgttccagctggtagcgctcatttaacagggactccaggaccggagcaatgtcctcctgacggctcacctgattgagatatcccagatggccccggttcacccccagcatgggaatgttgcggcccgccaaatctctggcagcctgtatgagggtaccgtcccctccgattgttatgacgcactccgtatcccccggcacctgggccccgtctatatgggctccccccctggttctctcaggtgtatggtgcaggagacactctgctccctttgcctccaggtacgccttaatgaatacctgggcctcctgtacatattctttgtcaagattggcaataatataaaaatgtttcatggttatggggctcctgacgtttttatacgttatttatccatttgtgcaaaccgctggccgcttaatccaaacactcgtgggcctgctccacaatggcccgggccgataattcgttttcctcctgccccgtctcttcctgcggtttattctggaggtacagaagatattcgatgtttccctcaggccccttgatgggcgagaattccagtccccgtatgcccaaaccaatgctccgggcataatccatgaccatctctatgacctcaagatgaacgctcttttccctgacaacgcccttctttcccaccttttcccgtccggcctcaaactggggctttatcaggcacaccacctggccgtcatcggtcagaagctgttttaccggtcccagcactttggtcagggatatgaatgaaacatcaatgctggcgaattcaatgcgttccccgatatcctccggggtcacgtaccgaatgttggttttctccatacagatgacccggtcgtcattgcgcagtttccaggcaagctgtccatggcccacgtccacggcatacactttcaccgcaccgttctggagcatacagtccgtaaatccgccggtggaagcccctacatccatacataccttaccggccagctccacgccgaagcggttcatggccttttccagcttaagccctccccggctgacatatttaagggtgcttcccctgacctcaatctgtactgtctcctcaaaggacgtgcccgccttatcttccttctgtccattgacatagactatccctgacataatcagggccttggccttttccctggactcagccaggtttctccggaccataagcacgtccaaccgctctttcttcattaccgttctccttataccgaagcggcatttccccgctgccttccggcttaagggtgcaatgccgcctgtgttatctaatgcctgtcaaaccttttctgccgccattttgtccggctgtcatctgtccgtgagcgtaaattcacgcttccttcctgtccggaacagggcggattcctaatgtttcctggccgatatagccgccggctttcatggtccgtatgatggaatcactgtcgattcccaatccttcccttaatatggacacatttccgtgctccacatatgcgtcaggaatggcaatattaagtacctttacttccggatagttttcatgtatgaatgcggtgaccgccagtccgtaaccgccctgaagcacattttcctccatggttacaatcaggcggtgcctctctgccagacgggataccattttccggtcaaagggcttcacaaacctgccgttggcaaggctgcatctgtatccctctgctttcagcttctgccgcacatgttctcctgtgctgaccatgctgcccacggcgagaagggcaatatcctcttcctcgtaaagcatttctcccacaccgtatgatatgggctgtctgaattcctttagcccgcggtacgcctcgccccttggataacgtatggccagaggactgccataatccatggcaaagtccagcatggcccgcagctcccacagattcttgggagccatgacgctcatattgggtatggaggtcaggaaggaataatcaaagattccctgatgggtctccccgtcgcttcccacaagccctgcccggtccaccgcaaagagcaccggcaggttctggatacatacatcgtgcaggacctgatcataggccctctgcaggaaggaggagtagaccgccaccacgggcctgagccccgccgccgccatgcctgcggcagacgtgactgcatgggcctccgcgattcccacgtcaaaaaaccggtccggaaacttctttccgaaggcagccagccccgtaccgtccggcatggcggcagtaaccgccaccaattccggatgctcctcccccagctgacacagctttctggagaacacgtccgtataggaaggattggtctgggctgacagggattttcccgtctttatgtcaaagggacccactccatgaaaataggacggattcttctccgcgggacggtatcccttaccctttttcgtcatcacatggaccagaaccgcgtgatccagcttttgggcctccctcagcaccttgcagagagcctggatattatggccgtccaccgggcccagataggtaatgcccatattttcaaacagcatgccgggtataaacagctgttttatgctgttcttggtgcgtttgattttgtctatcatggcagtgcccaccaccgggatccggtccagagcgtctgccacgctctttttcaggtcgttgtagccgctgcctgtgcgcaggccgttcaagtagcgggacatgccccctacattttccgaaatagacatcttattgtcattcagcacaatgataaaattcttcttcatcctggcggcattgttcagagcctcgtacgccatgccgccggtaagggccccgtctccaatgacggataccacacggtagtcctcccccctgatatcgcgccccagggcaatgcccagtccagcggatatggaggtggagctgtggcctgtgtcaaaggaatcgtagggactctccttgcgcttgggaaatccgctcaggcccccgtactggcggagctcgtcaaattccgccatgcgcccgcttaatatcttatgggtataggactggtgtcccacatcccagataaccttgtcctccggaagatttaaggtcttaaaaagggcgatggtcagttccaccacgcccagattggaggccagatggcctccggtatggctgattttctcaatcaggaaggtccgtatctcctgggccagtatctttaaatcctcgggcgggagagctttcagctcctccggcccattaatttgttccagtatcataataacggtatctccagtcttacttctgacgacccaccaacgcacggattaagtgctccaggaattcattgtttcccggcagcttgtttaactcctcaatggcttctgtagaaatctgttccacatccttctttgccttctccaggccttccagggtcacataggtcgtcttcttattcttttcatcgcttcctgaaggtttgccggtcacatcctggcttcccgtcacatccaggatatcatcctgaatctggaatgccatgccgattttggatgcaagggactccacaattttgcagtcctcctcagcggcgccgcccagaacagcgccaatcagcatggaagcctcaatcagcgctcctgtcttcagacggtagataaaatccagcttgtcccccggtataggacctccggccagctccacatccacggtctggcctcctatcatgccgtacacgccggtcttatgggcaagaatccccatagcccgcccaatcctggacaattcgtccgggtcaatgcttgtctcaaaggcattggcggcagtctcaaaggcgaacatcataagggcatccccggtaagcacaccgatgtcctcgccgtactcagcccatgtgctggccttgcccctgcgcatcatgtcatcgtccatgcagggaagatcgtcgtgcaccagagaggatgtgtgtatcatctccactgccgccataaagggaatcacggcttccagaagggtgcctgtaaaaagccggcacatctcctgcatgagcatggggcgcaggcgctttccgcctgccttcatgctgtaattcattgcctcgaagattgtcttttgatggcctgtttcctccggaagataagttccaattaactgctcaatctctgccgtacgcgcatcaagttcctgtttaaatgtttccttatcactcattttcatcaccctcactcaatatctgaatctgtttttctacattgtctatctgaccgctcagggacttcaccagcttcatccccgcttcatagcaggtgaatgattcctccagcgtactgtccccggcttccagtttctttataatatcttccagccgggcgaaattctcctcaatgctggctttattctcttctttttcctgtatatccgtctttttacgcggcatcctctatccctcacttcccggcagtttcatggattctgtctccacgacccgggcgtccgcacgcccgtcctttacgctgatacgtattatgtccccaggctccgcctgtgcaatggaggtaaacgccctgcctctggcgtctgtcacaaatccgtatccgccccccagctttttaaggggcgacaaaccgtccagccttccggacagcagggccagcctgtgctttccctctgtcagtccggcagccatctgcgcctcaaggcgccgtttcctgtcctccagcttaagccgggatgctcctagctcctcctccatcatccgttccaggcggctctccatatccgcaaggcgctgccgcctgtcgttgagctgccgttccggacttaaaagttttaagcgcataccgcactggtccagccggaaatgcagcttttccagcctgcgctccatggagcgctctaacacctgtctgtacagattcacctgctccacaaactgaccataatcaaacacagccagttccgctgccgccgacggcgtgggcgcccttaaatccgccacgtaatccgctatggtcacgtccgtctcatgccccacggctgagataaccggagtagtgcagttaaagatggccctggccaccatttcctcgttaaaagcccagaggtcttcgatggaacctcctcctcttcccacaatcaggacatctaaccccatacggtccagagtctcaatgccctttgcgatgctgtactttgcctgctctccctggaccagggccgggtataatatgagctggacatagggattccttctggcggatatattcatgatgtcacggatgaccgctcctgtgccggccgtgacgattcccacctttctggcatacttgggaatgggctgcttgtaactgctgtcaaacattcccatctcctccagctcattccgcagcttttcaaactggcggaacaggtctccctttccttccctggtaatctcctttgcatagagctggtatcttccgtccctctcgtatacatccacggtgcctgacaccgtaacctcctggccctccctgagctcaaagtccagccccttcctctgtcctgcaaacatgacggcagcaatctgcgcgccgccgtccttcaatgtaaaatagatatggcctgatgtgtggtacttacagttggacacttccccccgaattgaaatccggttcagggcaaagtcctgtgtaaacatgttccggatatatgcagttacctgagatacggtgtaaacacttgccataagtcctgcctacgcttcgctttccttattccccggtgtatcctggggctcctgggaaacatgagtttcctgggatgcctgaatttcctgggaacccctggtttcctgggaatcctgattttccccggaagccctgttttcttccggcgccttggcctctccggcagccctggctcccttgactacaaacttggccagtattccgtttacaaaggacggtgaatcatttcctccaaactttttagccagctccactgcctcgttgatggataccttctcaggaatggcgtcatcgtagagcatttcatacagggccaggcgcagaatggtcagttccacctttcccatgcgcttggtcttccatccggcagctgcctggttcagcttcccatctatctcaggaatcttctccattatgtttgctgttcttgcctgaagatattcactgtctgcctcttttaattctactttatgcaatacctggagaatacccgactcatctacatcgtcttcttccggggactggaaatattggcccagctgggctatggcctcttcctgcgtcgggtagaagtcagccgagaacagcatcttaaagcaatgctcccgcaattctcttctggtcattttctctgcttgtactaaaaagcggtggctttccgtacattttcctttcttcgtgatgtccgctccttccctggcccgggcatgtcctaaatagcccggggatgaagccgctctagatattatagcaaacccagtgcataaaaacaataaaaaatgtataaaacactccccaggcaacgctccggggagtgcttacagatattatattaaaccgtggttttatctgccttcatccatattgactccggcaatctttacatttacatccagcactgtcaggcctgtcatattctcaatggccgtgcttaccttttcctggacctgctcgcttacggacgggatgttgtatccgtagcggatattgagggacaggtctgccgacacatgctcctccgtcacatccaccttgacgcccttgctcagattcttcatgcccagcttgcctaccagctcattggtgatgttgccggccatggaatccacgccctccacctctgtggcagccagcccggcaataatggccactacctcgtccgcaatctgcacctcgcctatcttctctttctcgtataatttatgggtactgcgattttcctcagacatcacaacttacctcctgtcaagacttaattactcaaacttctcacacccgatagtgtggagaaccttgaaaactcaatactttcgtacggtaatggaatttttccatatcacagaaattttccatatcacagaagtacagccggaagaattcacatccagttttgtctgccatctgccaaaatacctgcaggatgcacttcccaaggggcaggcggttgcctaaaagctattttgtacgctaaagtattgagttttcaaagaacaatcccattttagctacgggaagtttgagttgtttattagtattataacaaattcgggagtatatgtataggattaattttgacgccctttctcggctttttctttcagcttttttcagctttttcccgcacaatggggataagttcttcaatgggcagcttttccgcgtcatggaggcgcagtcctaatgggagcatgaatgattcccctttcttctcagctgttcacttaccgccatcatgcaggcagcagcgccatgctggttgtcggtcatctgtgcctcactgatgtagtactccggggttccgttgcggtccttccggttatgggggtccggtccggcgcccaggcccgcgcttgcgcagattccgtggaggtgccagccatcctcctcttttttaagccgggtacggcggatgccttcaaggacctcaattcctttatcccaataggaatcgccaagcatcccaaggcgggcgcccttcatcagggcataggctgtcatggcgcttcccgatgtctcgggataattgcctggaaggtcagcatggtccacaacctggaggaacatatgggattccctgtcctgatactgcaaaaggccatccagaccgtttttaagaagcaacaccagttcctctgcccggggcgtataatcctttgccagcccgtatacatccgccagcgccataaggaaccatccttctgccctgagccataccccggggctgcggccggttaccggatccgcccagtccgccttacggcttacatcgcatccatgcaggtacagccctgtcttttcgttccacagcaggcagtgggtgctttgaaactggtccatgatatcatcccaccggtcctcaccgttttccgccaggcattttgcgtaaaaaggcatagccatgtaaaggccgtccagccacacctggttggggtaaatgtccttatgccagaagttgccggtggctgtccggggataatgttcaagaaaagcatatgccttctcaaccccgcggccataccgcccatccccggtcaggtcccggaggatccgcagggatttgccaaaactgaccttatcaatattattttcatcctctttccagttggcaaccccgccgtcctcatccaccagccacttaccggcatcaaggatgtaacggttccagcgcgggttgccggtaacatccgccaggaaggctgctccggttacacagaggtcattcttataattccagggcctttcactgaggaaacggggaaatgccgtttccatgtactgtgaaaaatactctaaccacatatcgcttcaatctccttcacactctataaaattcactggaccgtcaaacggccgctcagataccagcaaaatcagcgacccggtttaaaatcccggcggcctctccaatggtaacagggcgccggggcttaaaacatccgtccggttccaggctcatgaagccaaaatacaaagcgcgggccacattggtgccgtaattattgtttaccaatgccgcatcggcacagacaggcatggtacaggaggcattgcggtaattcacgccgcaggcctgcatggctaccgtggccatctcctggcgggtgatatggccatccggccgaagcagagacgcatgaccgtccggccaaggccgcctctccagtgcaaggaacccattccccaccgcaattctcagcgcctcactgcacgactcaccgtcctctcctccccagcgcagcgccgggtctgccagtggcagcagcatccctgcaagctgttcccgggttatggctgcgtctgccggtatggctcccgggaactcccacattccccggcagtacagccgctgccactcataaccccaatcactgccggacagccccttgggaaaaacccggtactcatggctggtttcggtatttcccttatggtctgtgaccgtcacccgtatgaaatctgctgtcccaggaacagggaactgctccccttgcccggcctgcttccaggcagcgccgtcagtggctgtctgccagctatacataaagtccatatccccgccgcaggcccttgcttcggcctttacggtttccccgtttacgggaacgccaaggatacggacaccgccaggacgcggaaagctttttccgttgattatcacatcgtcaaccacaggctccttccagttcatgctgcgcatgggccggaccaccccgtctatgcggatgttcctcaaggtcaggccggtaacaggaacttcgtcaaatgcctccaggaaaatcccgtaatcgcctccgtgggcaatgatgttttcaatggttatattgtggaataccggcaggtcactgccatttctcccatcttcataaagcatggtgccgtggaccgccgccccgtggacatggtccatcacactgtccgccagtatgatgtcctccaccctgcctccacggcgggcattggtctttaagcggagcgcataggtcaggttagggctgctgaaccggttattgacagccagcacacggcggatcccgccgctcatctcactgccaagggcaatcccgccatggccgtctgcaaactcattattttctattagtacattctcacagggtatgttggccatgcggccgtccctgtcccggccggatttcaggctgatacagtcgtctcctgtgtcgaaccggcaattgcagatatgtacgccattgcagctctccgggtcgcagccgtcattgttggcgccatggctatacaatgtgacgccgtccaccagcaggctgcggcacatcaccgggttcagctgccacatggggctgtttttcagggtaaatccctgaaggagcacccggctgcagcggatgggctgtatgaaatttggcctcaggtaatggcccgggccaaagaccctctgctcaacaggcacgccgtccatattcatccggcgcagggccttgcggtcctccagctgaaggtccggctcatcatcggaccaagcgtcctccacctgatggtgccagttccaccagtggccggaatccgctcccccgtccagggttccttccccggtaacagcgatatcatgggcatcgcaggcataaatcaatgggctgaagttataacagggcgcggcctcccagtgtgagaaaaccaccggatagtgaagctgcggattttcattgacaaatgacagcacggactccctgtcctgaagatgaagctccaccctgcttttcagttccaatgcgccggtgcggattatgcctccgggaagcatgagcctgcctccgccttccctgctgattgcatctatggcctgctgcagggcctgtgtctggacagccccgctgtcaggaaccacgccaaacaaacaggcagggaactcccggtcaggaatatccggtctttctatctgtttcaggattgtctccctcaactgtaatttatccatggaaaacctcctgattggttttgatttcttcataactgtctattaactgtccaagatggacagccagattctccccatgccattggtggggcccttcgcatatttcatgaatcacaaggccgggcgcatctgtcagcctgtatgcattccggataatgtccacctgctccgcggcattgacaatcccgcgcggcccgttcagcctgtcgccccggcaggactggataagaaggggccttggggcaatcaggctggcaatatcccccatatcccattccccacgttccataaggtaatccacaacgcgcatcaaatcccaggccagcattccggccacagggatgcccaggggctcccccatatgggccaggcggtaacagtcacccttcatggcggttgccgcatccttagtgtcctccaggtcctcacgccgctccccgaagccacggcagtccgggcagaccgccacatacccaagcttggcaagctgatagccgtagtcatagtggtactgccggattttatcccggaccggcccataaccatccagtccggccactgaatattttccagccccattatgtccgggcgggcatatgaaggggcgggaggagcatccggctcccggaggaaccagcacgaacataggcatccatacatccggttccacctggattcttatgtgttccctcctgattcctccgggcagcaggaggacatcctccagaaccggggacagaccgcagtcctccatcttatcaagccccaaaagcccgtgaagaagggaccttgtctctgaccgccactgctcaaactctcctctagtgtctccccggaaggaatccctgcgtgcataccggtcaaacttcctgagcatggagggaaggatgccatagcattgttccatcctgggcaggctgttatttgaatcagtcatcctttgcttcgctcccgccggcagcaggcaccgcggcctctgcttttttcttcttcagatgctctgacaaaagcggccagacaacgcagaatacggaaaccagcagcagggcgcaggaaagcggacgggtgaaaaactccttatagctgccatgggcatagctgataccctgacggaaataacgctccagcttgctggacaggatgaaggccagcaccagaggggaggtgggaagtcctgaaatgctcatgaaaattgccagcaggcacagggcaagcatcacgtagatgttaaacatggtattggaaatcccgtatccgccgatgtaacagatgaccagaatcaccgtgtacaggtaatggtaaggaaccttcagtatataagggaaccagcgttttccaataatctgtacgatgtaagtcacgattgcagccaccatgacgcaggcaaagataagcatcgtcaggtcaggctgttcggtcatgaacagggggcctgcctgaagtccgtggatggtaagtcccgcaatcagcattgcggtaatgccgtcgccggggattcccagggccatcatggggataagggcaccacccagggaggcgttgttagctgtctcagaagcccacacaccggccggatttccttttccaaaactctccggctccttgctgatgctttttgcataaccataggcaaccatgttggagataccggagcccatacccggaaggaatccaatccacaggccggatacaaatgcaaaggcaatggtcttgatattctgcaggatatcccttatgccgattcccagccccttcatattcaccatgtcggcttccggcatcattgcctcgcccctggcggagtcacggatgatctggcacattgcaaacattcctaacatctgggcaaccgtactgatgccggagcttaagtatacattgccaaaggtaaaacggttggaaccattaattgggtccatgccgatacatcccatcagaagaccgatacctgctgccatgatgcccttgaagatatttcccttggacaaggaggcaaccagggtgatggcgcagaaacacagggagaaatattcccacggcccaaggtgcagggcaaattcggcaatcaccggagaaagcacggtagccagggccacggaccccaccgttccgataaaggaagccgtcataccgattcccagtgctttgctggcctgtccgttcttggtcatgggaaagccgtcaaagcaggtggcgattgcggaagacgaccctggaataccaatgagcacagcggaaatgaatgtgccggacacaccgccaatccagatggcaagcagcagcacaaaggatgtctcagtggaaaggccaaaggtaaccggcagcaaaagggcaatgcccagggttgcggaaagtcccggaatggccccgaacacgattcccagggaaaccatagcaacaatcagcagcagattgactggctgcaggcagaccattaacgcacttacatattctgacatttatcctgttcctccttatccttattcaaacagccgaccggccggaagctttacctgaaagccaaacacgaacatggcataaaggcctgcggttaccagcacggaaatgatgactgcggcaacgggtttcaccttgctgacaccctttaaatcataaatcagggcaaaggcggcaaagggcgttgtcataaggaatccaagccaggtcatggcaaaggcatagacaatcagcagcaggtagctcttggtaatcttaagggcgccgccttttggaaaatacggtttctcttcttttgcgcgttccttaatgcccttgatgattagtgcaattgaactcattgaaatcagtgcgattgccacatagggcagaaggcgcgggcccggctccagaagcttggctggctgcttgatggactgggctgcagacaggaagaacgcacaccccagaaggcccgcaatgccggtaactgtatctctgcgcattttcataaataattcccctttcttttaaaatgtcccgggagatttctcccaggacatccggtacatcggtacgtgtatatgtattgcctgaatatgacaggcttactcctgaacaaacatatccagctccttggcaatctccgcaaactgggcatactcctcatcgtggatttccttggattcagcaaggtcatgccagcctggtatattaccaataccagcaataccagcgcttacagtctcatcctcacaaacagccttcatggcagcgttcatgtttgcaaccatggtctcgtccatgccggccggtcccaggaggtagtggtaaatggacattacgcagtcatcaaagccctgttcctgaagggtcttgtagttgtccggcagcgcttccggatacttggaaatggtagtcccgtcagaggatacggtgccgattaccttcaacttgcccgctttttcatattcctgggcattaccaacgcctacaacaccgatatcaatgaatcctcctgccaggttggtcagacggtcggactcggatgcacactcaaccgagttgagctcaatgccagttgtggaggtcagcataccaaagaggaaggtgttggcgccagccgcaggcatacctgcgttcagctcgcccggatgggcctttgcatactcaacaaatcccgcgaagtcatcatatggagcatcggccggtactgccagggttgagaagccattgtcctgcaggcaggcaatcagggtgaagtccttcatcgggttgacctctgcattgcccgttatgtactggatgttcagggctgaggtggcaacggtaagggtagtgccatccggtttagccgtggaaacggtctgatggccgatggtattgctgtcatagttggtaacggttgtcttcaggccgtaaatccggttcagcccttcactgtaataacggatgcccagatcggagccgccgcctgccttgccaggcaccacaagggtaatggtctcctttttaggaaatccgatgtcatctcctgatgctgcttcatctgcagagccgccgtctgctgcggtggctgccgctgtggtatcacctgtcccggttttgctgccgcaggcagtcattcccagtactgctgctgccataacccctgtcattaagaaacgatacatactctttttcataacgtttttctccttttattccactttttaggcagacttattctgcctgattttaagaactgattctcaacacaccacctagaagagactggatatatagggaaatattgtataatctgtctaattttaacccttcgtgtgtttacattttgtattatatagtatttataaagaatttacaaagcagatttaattatagctttcataccactttagttatagtaaaagactttcttcttgacagtccgccaaaatcatatatgatggaaataaatcctgaactgcaaatgcctgcagttatggaccgataggaggcagccatgaccacacgccagctttattaccttgttaccatttccgacctgggcagtctttcaagcgcagcccaggtgctgggaatctcacagcctgcgctgagcaagttcctgaccgggtatgaagcatccctgggctttcttatattcctccggtatcaccgccagctgacccctacttccgtgggcaggtacgtgattgactgcgcccagaaaatcctggacgagcagacccgcatgctgcagattctgcgggccgtgacggacagcaatcacgcccgcatacgtctggccaccgcgcccaaccggggagccattatctacagccgtatctataaccagttctcacaccgctatccggacatctcccttacgctgaccgagctttatgcccgggaccagccgggcgccatcctccatggacagattgacctggccatcggttcaggcaggaattccgacaaggtaactgacctgcccattgcctatgaggagctgctggtatcccttccagtctcccatcccctggcaacagcggagaaaatccgtctgtccgatctcagggataccccttttgtactccagggacccaggcacagtatccggattctggcagaggagctttttcaggaagccggatttaatccggtggtaacctttgaatccaacgacgtcatcctggtggactccatgctgcaccaggccgtgggggtgggactggtgtcccaggcccatgtgtttccctgtgaggagctggtttaccgctccctggaccctcccatccaccagacccttcatatccgctatcccctggggcataccctgacagaaccggaacgctatcttgcaggtcttctgattcatgagcgtttatccgattcccgctacaaggccatcccctctgccgaaacagaggagctgcttaggattgtggaccaagacagccagcccgcggccgatgccatttccccatcccaagcagccatacgtgcccacgcagcccactatacggcccctgaactcaacctgaatacccagctgctaaaatacgtcatcgccattgtggacgagaagagcctgacaaaggcagcggaaaaatatttccttacccagccagccctgtcccgccatctgcacaacgtggagggcatgctgtgcgcccagttattcacccgggtacataaccgtcttaagcccaccaatgcaggtaaggtgtttgtcaacttcgcccgcaacatccttcagattgaagctgagatgactgcccatatccatgcatatcagaccggacatggaggcggtatttacctgcactgcgacccagggctgtccggtatcctgcatgggcaggtcacgggcggtttcagccggctccacccggatgtcaacctgtatataatagaaagcggccgcgaaaccgcccaggaagccatgctcaatgcatcggcggacttcggcctttacttttcctgcgaggaggagcatccaatcctggacagccgcatcctggatgaggatgagctggtgtactgctttgggacagaggattgcccggacccggagcaggatatccgtattcccgttccggtctccacagccatgcatccccgccgtatcatgctcgctcctcaaagcagcgccctgcgcctggagcaggaccgtcttctgggggaatggcccggactgcctgccgcggttgtatgcgaggcccggccggatatcctgcggaccctgtccatgtgcggggctgccagcaccatacttcccgcccgttccctgaatcaggaagccttatcccggtgcagatcctttgaggaacctcagaattactatctgctgctggtccatcacccgggacgcaacctcccggcctttgtaaaggacctgatccggctgctgaatgatgcatttgaaacatatttttccaaccataacgaatcataacaagaaggcccataatgaaccaattattctgtcaccccgaaaccattgcaatcaaacggacaaggcagagggctgactgcagtaatttacagcaaagcgtcaaaaaggctgccgcctttacggttcctcaaccgttaaagcggcagcccggccttctttatatatccggcctattctgccatattgagcagcgtaatgataatctgatctgctcccacctctgccttgcgtttcacgatatcctcaatctgggcccgctgcggatccgtaatggaaggcgcattgatgaccacatccaccttatccttggtaatgctgacaaccgggtctgaaaagccttttgccatcaggagggtttctgcggcattttctttctcggaaacctcagtcaggtcaatcatatcctgtatggccttctgtttggccgcttcgtcaatgctgtcactgtttatcaggctcatcagtgtctctttgttcttggcgcgcacctgctccctgctgagctgtacgtttgctatgtaatcagccacgttcatgccgctggtcagtacggcttccccgggattctccaatcctgcccgggcggagctgtccgtatctgccgctgccatctgccccggatcggctgcctgggtagcctcctccactcctgtgccgtctcctgcctgggccagctgtccctggtctgttccggtgtctgccgctgcctgggcgccgtctgcgccgcttaccgcatccaggtcagaagggtcctggtccagactgggaatctcctgtagtccggcctggccgtttaaggaggctgcctggttctccgccaggatatcttcatctgaaatgtccatggcgcctgcctcatacacccggttgccgcttgccagatccttctttcccgcatagttcagatatccggctgccgcaatcatgacagccagtgtcgtgatgatgatctggttcctgcggaagagacgtttcatgttcatgtccttcatgtgctcttttacctgtttcatattcttgattttcatatcctgcactcctttatttattccaccctctttaatacttttattttatgtgccggcaggccaaataatgcttccatggcctcagaaatttcagcttttacggttgggctgcctccgccctccgcgctgataatgattcccgatatctccggactcagttctttttcaacaatgggcgcgtttgtgctgccgcctgaaccgcctcccgatagtatggtactctcctgtatctgattgtttgtcacatccctggtgccgccccctgaatccttttcctgggtggtgctggtattggtggagcgatccacacgaagcaccttttcgctggaggatttaagcaccaccatgacatccacctttcccacgccgtccacggactttaatatattcctgattctgttttccatctgggcttcataggacccgtcctctgatgtgcgggctgccgccggataggaatcctccttcccctctgacgcgcctgccccatttccgtccggcccctgggccatcccggttttggaggcgccctggtcaaagccgctgccctctttgctgccattggcattgtcctttgtccacagcggaaccgccccggtgccgtctgtcccggcccccacggtctgctcaccggcattcttgttctttttgcttcctccgggcaggggaaaggagagaatcataagaagaacacctataagaagcaataacagccacttttccttagtcatttttccactgaatttcgatatccgattcttccagtccatagtactgcgccacctttcctgttaaatggtttaattttttatctgccaccgcgcctttcgcctccgccgtcttttccggacgctccgtttccccggaatcgccggtctcctcccgttccgttatatcccctgttttctccattcctccgtcttttggcggctcctccagttccacatcctcgaccttcacactgtcaatcctccctgcgtccacattcacgggcctgctccccgtataatcccagctgtcgggctccgccttctccttctccttctccttctccttctccttctccttctccttctccccgctgatgaccataccgataccttcaatctgaccataacggctgctgttcctgtcaccgtcaatctgtacgctggctccggtacatgtaaacccctccgccctggccatggcctccacatcagctgccaccgcctgctcatacttgcggataacctggtccagacgccgttcttccatcccccaaagatcctgtttcaagtcatccgtgtcattctgaaaggaaatggatttaaacatggacgatatctgctcatccaggtgcagtccccctgtaaatgggctcaccaccagaagaatcaggaccattcctgaaaaaaagcggatgtatttgccatatttggagtccgccagaagattatttaccactgaaagaaaaatcatgtagtatatgatgttttttacccatccatagacagcttccataggcatctccttttataaagcaccataggttccggcattttgcagtccgctccgttacgaggcaaaataatttacattggtggacgcgcatgtgacagctatggctatcatgaacagaaacatggagtaaagcacaatctgtagcagcagcttatgtcctttggacacgcccgccacgcaggacaccacccgtttgtcgcacacaggctgcatcacggcggccacgcactggtacataaccatgaggaccgtcagtttcatcaccggaacagcggatataacagccagtaccaccacagccgcggctcccattgtattcttaatcagcacccctgaccccagaaccatctgggccatggctcccgccccctggcccagccccggaatcatttccatgagccgtttcattcccgcctggcctgccgcgtcggcatagggaagtatcatggcctgtatgagatgaaatcccaccaccagcccggttaaggtccgcagactccacaccacggcctgctccagcagctcagtcagctttgacagcagcgcctccttcgccacatggctgcccagtaccatgagcacataaatcctgaccatggacagcaggacggtactgcacagccattgtacccctgtcaccgcgcccagcatacactcatacagtgccaaggcgctcatgctgccgccggaaaacgccactgccatatagtaggccggcatgagcagcttcatgaattccagtatctgttccatcacctgggcagccacctgcaggctggcggaaaaactggctgccagacatgtaaacagcaggagatatgtaacgaaaaaacccgtgtctgaaatctggccgcccttaaatacggaagaaacattggtaaacacagctccaatcagaccaatggcagccacctgaaacagcatctggccgcccctgtccacctgcgagaacagagcattcttaagtcccattccggtctgtcccaggatacccttcaggtttcctttcatcagctccttcatcagtccccagaaggaaagtccttccatttccccgtcctgctgccccataacatcgtccagaaactgctgaagcccctccatctcatcctgaagccccatatcctgcaatgcctggtccacgcctgtctctgtgccctgaacttccggctgtccccgccactgctcttccggctgtccccgccattgtccctgccgctgctcctgccgctgttcttccggctgtccctccagctgccctcccgccgaagctccgtaaacagggctgcctgtccatcccgggacaccggcaaacagcaccgcaagcccccatagaaccgcgctcctgactccccatttcatccatctcttcatcccaaaaatgtctccaatgtcccaaaaagtgccagcagaatgggcatactgatacccagaatagacagctttccgaatatttcaatctggtttcccagggaaccgtaccccgcgtccttgcagattcctgacgcaaattcggccacataggtgatgcccaccatcttaagcagcgtcaccagatatacgctgttcaccttgatatagccctgaatccgttccagggcctccagtatatcctttaactttccggttccgtaaaagaagataaaggcgcctgccgccatgaccatgtaggcggcgtattctccctttaagccctttaactgcaccgccagcaggaccgtggcaatccccgcggccgcaatggtaataattgtcatatggtttcctccctaaaaagacgccttttacagcgcaaacagattcttcattgtctcaaacaggtcgtatatgtaaggtatcatccagaataataccagcaccagtccggccagactcgtaaggaaagcctgctcatcccggccgctgtgctttaatacctggcagatgacagataccaggattcctactgccgctatgcgaaatatcagatttacacccattgccgtctcctcaatcttcttaaatatatatttataaatggttcctgtgtttcacaggcacatcacaatcacaatgcatgtgtccctgacttgtctcagaacattacaatcacaagaaacatccctcccatgattcccaggcttgtatacagcctgcatttctccctctggttctgtctgagataatcaatggtcaaatccagctgttccagatacagcttaagggtccgctcctgcatgtccacatccagatatcccagatgttcccccagatgggccagctgttccaaatcctcctgtaccaggggaatccggcccccgtctgtattcaggtccatcacctggcgcctccatatctcctgaagggattctccctcctgcatatatattccctccgccgcggcctcaaacaggccccccagtggtcccggctcccgtttccccacccgctccagggcttctgccagcggtgcccggctgtatgtaatctcgccttttaagaaatatatcatctgtctgaggatctccagcatcctcagccgccctttccactgcatggcagaccagattcccagtccgcctgcggaaaacagcaccagaattgcccctgtccacttaaatgctgccatgttccgcctcctttacgctcccatccgcatataggacatttccaccgccgtcccatatagacgccacatggcctgccgctccccggcagtccagcagtatcatccgctcaaaggctccctggtgaatcagttcccccacagccggcttctgcatgatgtcctccagcgaactgccgtggatggtggctgccagagaacagccgcagtttctcacatattcaatggcctgtacatcctccctgcttccaatctcatccacagctatgacctgaggcgccatggaccttactaacatcatcatgccctggctttttggacagcagtccagtacatcggttctcatgcccagatcgttctgaggcaccccctgatagcaggcccctaactcagaccgctcatccaccacccccacggacacccccggtatccttctgccggcgcgctgggtcctgggtccgtccgagacctggcggataatgtcccggagcagagtcgtcttgccgcacctgggcggcgatattaccaatgtattcaggaagcggccgtcatccgaatacagatactccatcacctggttggcacagccctgaatctgatgggctacccgtatattgatgaaggaaatggatttcatgagccgtatatcctgtccaagagccatggttctgcctgccaccccaatccggtgtccgccctgtatggtgatgaatccctgacgcagctcttcttccgctgcatagagggaaaaactgcacatatattccacggtctccttcatctgagcctgactgaccgtgacgattcctgccctggcccagtacggttcctgttcctggcagcggccgcttccccggatatcccttaccggcggatcgggaatccccactgccaggcttccatctgttttaaccgcatattcccggccgccgcagataagcagcagcggtttctgggttctcatccgtatctcctgcaccctgtcgaaatccacggtaacctgtccaagtattgtccgcaggtcccttggaaatattttcaggacttcttccctgccagccataatcttcaccccttttacctcaatatatgaaacgtgtccaaaaatatgactggagccgaaaaaaaggcagcaccggcccgtcgggggctgtgctgccaatactgatttagcttctatcatcttctctttaccttctttacaatctgccccgcgggcctcctgtcaatcttgtatacaatctgcatgaaccgggccacctcatcccaggcctcccggctctccggaaccaggtccatactcatctggaacacatgaaacatcccctcatacacggacacccggcgcttcactccggccctccgggcattttgggccgcctccagcgtatcacttaaaagcatctcatggctgcccgcctgaaaaagcatgggcggcaggcccctgaaatccccgaataccggcgatatataagggtccctgggatcagacccgccgatgtatgaggaattataaagcatgctctcccgcgaattgccaaagagaggatcatgttcaaagttaaactcataactgtccccgctgcatgtcaaatcagcccatggggacatgagtaccaggcctgcgggctgaggcattccatggtccctgaggtaaaggcacagggccagagccaggccgcctcccgccgaatcaccggccaccaccacctgtcccggcctgtagtgtttttccttaatcagccactggtaggcgtgaattacatcctccagggccgccggataagggtgctccggcgccaccctgtaatccacggtcagcacgtccccgccatagctgagccggctgtagcgcacggaaaacttcctgtaaatattcttcatggggcctatatatccgcctccgtgaagctgaagcaccaccctgccggtgaccactccctccggcttaagatactccattttaaagggttccctgtcaatgatttcatactcgtagccagatgggcatacccaggccggttccacgggatttttcctgaactcccctgtctggatgggttttcccagggacgtttccatgatgtcgtgaatcatatcacgcaccagcgccccccgtatactcacatttttattacgcatacttatctgtatcctctctgtaaatgcagggtccctccgttatcacagatgaaaccgtctgatgagttcgttcttaaatctcctgtcccccagaaatatggtcaaagccaggattcccacggtcagtattactgttatgattgccatggccggatgcgtgaccagccctgcggcccataaaatcagggggataaagctgaaaaccgtaatagcgatctggtacatgaaatagctctgccagttcaaacggtttacaacaatgagcagcaccacggccgcatccgcaaacagtatggttcccggcacagcatagttgacggaccagccctcaaatcccaggacccggtctatcatcacaagcagaatctgcatgccgaccgtttgtatcagcagtgattttcccaggttggcatggcgcaggatggaataccggagggtcagccccacataggcgattcccggtatggcaatcccggaccaccagagtccgtcataggtagcgatattcaccaatcccagaaacagggccaccacagccaataccccgtagcataccagtaccagttttttccatatgctctcgccatgctgaatcaccggataattccccttatccgactccggcatgataacgccgttgctctccagctccaccggaattccgtctgacctcaggcggccgaaaaaacattcctccagcctggaatcctggaataccttggtgaaggtaatgactgtcctgtcaccaaaggaacacacgccgcatttggcgggctgccgctcagacacgccaatcagcatgcaaaacccttcaatatcctcctgatactcccggtccatggagataagtccgatattggataaggtaatggtatgggccctgtcattgcggcggaaaatgaagccaagagccagccacttgacaaacagcggaaggatgcggacataccattttttctcatttgagacgttgtaggatatggtctcctccagcttttcctttacaatcttctcgtccatctgtctgcatacggatgcgagaatctcctcaaattcatccctgccctgtccgggttcatggtcaatggctgtcaccgcgaaaaagttggaggctgtgttggagccaaagaaggccctcaggttaatgggaaggttcacaccgatgtggcgtccctcctgttcttcctcctggtataccctggaaatggaccagatcaggcaggccgtcaggtacttcgtgatactgacccccattttacggctcactgccttcagctctcctgtgtccgcgtaaccgtgaaccacgctctgtcccccaaagggtatatatctccctgtaaggcgcagcgcaggacgggagctgtagcgtctggtccgcattttccggtaatgcttcaggtagctgtcctctgtctgggcggactcgccttcccccggccccacatccctgcttcggcctccccgctttaactccaggtagcctgcggtcagttccttcagaaaattcactgctcccatgccatccgtcaccgcatggaatacctccaaattaattctggccccataatagcttacgcggaacaggtagagctggttgctcttggggtcgatatagcggcagggccagctgctctcctgctcaacaaagggctggcgtttgttctcctcgaagtaataccagaaaaagcccctctttagcttcaccttgaacccgccaaaccggggcaggacttcttccagcgcccggtccagcagaccaggatctatctcttcttttaatgttacggaaatacggaatacgttgctcaggttttcattggctatcatagggaatattttacctgtgttatccagcctgtgccaccgttttccctggggattcttcttcatagcgcccctttctgccggccgtcccgcagatttttcgcgggtccggcgcaaactgtattttctgccattatatctctatcatcctgcaatcacaactatattatacttaaactttgttttcactcatctgctttgacctttggaccttttcccggcgtcttttgtttttgccatacatacacatgccctggagctctcaggaagcagctacgaggccggccgcctgttgggcagccgtctggcgtccgtccccggcctcaaaaaacggttctcaagcggtttccccggcttcggcctgacacagtttaaccaggccagccagtgtttccgccgctggtgtcccggacttacgcaggagctggccggatttgccgatgccctgggctgcgcgccggagcaggttctctattacggcatgacctggcttacgcctcgctgcagccatctggcccttctgccctccatgacagcctccggccatcccatggctgcccggaattatgaattcaacgatgaggcggaggactttactgtcataaaaacccgcatcaccggaaaatatacacacataggcaccagcgtgctgggaatcggccgggacgacggcatcaatgaaatgggactgaccgtcacggtgagctccagcggttttcctgtcggccccctgcccgagatgcgcaggcccgcggtcgccggacttcagttctgggccgtggtccgtaccctgctggaaaactgccgcgatgtaaaggaggcattgtccatgctgaaagacatgcctgtggcatacaaccttcaccgtggaggatgcgccagggaggcaggatattcttattaccacttaaaccgccagttctccgccgtcctcggggagagcgtgggcagctatataaaaaagcggcgcctgtcccatgctgccagggaactggtctacacggagagacgcgtcattgacattgcgctggaccatgggtttgaatccggagaagccttcagcagggcctttaaggccgtctaccatacaagtccggcctgctaccggaaaaaacggctggatgtcatcataagccagaaaccaaaagcggaccagcacctgctggcccatctgacagactccttaacggtccgcccccggatcgtggagattcccgatatcctcaccgccggcctgagagaccgcactaccctgaggaacaaccagattccccagctctggacccgttttcttgacctggtgccgcagattcccggccagcttcctcacggccggggctttggcatatgtgaatcctgcggtgagggaaacaccctgtacaccatgagcgacgatctgccgttctccgaggtggtgtccgtggaagtcagctccatgtctgtccttcctcctcccctggtgtataagaccattcccggcggaaagtatgccgtgttcacccacacaggttccctaaagagcctgccgctgacctatcagtatatctggggcacatggtccctcaccacccaggaaaagttggacggcagagaggattttgagctgtacgatgaacggtttctgggattttatcatcctgacagccagactgacatttatattcctgtccaataacccatacaggccatcacctgtatgggtaatcctgctcttcttcccctctgatgattcgtttcatacgggccagctcatccctggtcagaagtccattctccatgtattcctcatataccacctgtgtggcctccacaaaggcctgccgttcctcactggaaagggtgtatatttcagcgttggcccggatattttccattgcctgcacttcattctcatcaatgagacggttattctccttcatcatctcttgcgtacattcctccaaaatctcctgatactcacggggcagagactcataccatcttgtatttacgtagaagggttccgggtgaaactggtaattcacctctgtaaaatacttctggacctcataaaaccgcatcccggaggaattgacccagggattttcctgaccgtcaatggtacctgccttcaaagccatatacaggtcgttgtaaggaacagtcatgacctcggctcccagggcttccaatgttttattgatggtgtccatgccgttggagcgcatcttaagccctcttaaatcctccggcctgcggatcatccgcacgctgttggaaaactgcctgaatccgcctgcatcaccgattcccaatatggttgcgccgcttttcagggaatccatgcttatttccctggcaaattcagagtttaccagccgctctgcctgcgttctgtcttcgcagagaaaggggagggaaaacacaagcatcttgggaactatctccagctgccccccgcgaaatccctgtatggttccgtcacagacctgctccagcatagatgcctcgctgcccagctgaccggcagggtagatgtccacctggattcctccatctgttttctcctccagcagcttcttaaacagcaggaatgactggtggcgcgggttgtccacaggctgggagtggccaatctgcatggagtatatcctttcaggtttttttgccggtacgcccttcccctgtcctgtggcggacgccggcccctcttccggtttctcaaaaccgccgcatcctcccagtaccagcaccatcagagccgccatcagaatccatgccctgtacactattctcattccccgtccttctcctctctgatgccttccgcctgctcatagcggaactttaacggagacattccttccatcttcttaaatgtccatgtaaagtaatttggctccgaatatcccaccataccgcttatctgcttgatactgtaggtctcgtttcgcagcagttcctttgcctttttcatccggatccgaatcaggtaatccaccaccgtagtccccatatattgcttgaaaaggcggtttacatagtatttgctgaacccggcttccgacgcgatggcatccagcgtcaggcgtttttgataattttcctgtatgaaggaacagatgccctccacctccctgggcatgtctctgtcatgttccgtgccttcttccccgcactcggtctgggccaccatgtctcccacacgctcccgggctttctcatagctctcctctatctggcttacatccacaaagggggttccgcttcccatcatgaaggcaatctgctgctgtcttaatatcgaagccaggaattcttccatcttccggaaaattcccggcagcacatccggctcacggcagaaaacaacagccgtaaccatgcggtttgtctcgctgaacataacagtcaggtccagataatcaaactccttcctgacagcctgatacagcttctgtctgccgcatttatccagagagctctgaatgcggatgcagaaacagtttccgctgcactcagttgaaatgtttttcaaatccagatagtagagaacctcctccggcatattgcccagaaccaggtcattcaccatcttgctctccatcatgtccagagtctttaacagctttgtttcacggtactccttctccgcctccgcgtccagctcgtcaatggcccgcataattacattgataaacgcctccttcttcacaggctttaccataaaatccactgccccaaggcgcagggcctccaccgcatattcaaaatagtcataggctgtggaaaagacagcgcggaacctgtaatccggacttttgattttttccaaggcctgaagcccgttcaggccgggcatgttgatatcaagcacgattatatccggcctgtcgagcatcacccgcttgataacttctgttcccgaagcacattctatgacctggtctatatccagggaggattcatttataaagaagcgcagtgcctcccgctccagttcctcgtcatctgcaatcaatattttatacatcttcttctcccctgtgcaggtaaatactgacaatggtgcctgcaccttttttgctcatgattttaaggctgtcatccctgcccgtatataaggaaagcctctgccatatattccagactccaatccgttccggctgtttctccgaaagacgccttctgatcttctccaggcgctccctttccatgcccattccattgtcacaaatccgtatccgtatataatctcccgccctcctgacatccagaataagggttcccccctcttccttgggttccagcccatggattaccgcattttccacaaggggctgcagggtaaaccttggaagcatcacagcctgttccagcttccggtcatgcctgacatccacgttcagcctggatgaaaaacgcattttctgaatcttcagatattcctccgtaatccccagctcctctcctaaaagggccggtgtctgtgcgtccgccagattatagcgcagcagcactgccaatgaatccagcatggtcagcgcttgttcctggcgccccagcatgacggtcctgttaatgctgtttaaggtattaaagaggaagtgtggattaatctggctttgaagcgcaaggaagcgggcctggctcagcagcttttcatactcctcgtttttgcgctgttccaccagcagctgcttttcgctctctattttttccttcaggctgaaggccatatggttaaatgcccgcgagagcatgctcacagtattttccccgaagctctccttaacatgtgcgtccaaatttcccctggctatctcctccacctgttttttcagctcatttaagggccgtgtcaccctcacaaaaatatagctggctgacgctgcaatgaggacacaggcagctgccacggctcccatgttgaatgcggtcatcaccttccgtctgtgggtcagctcccggttgctgtccacactggactccagcgcatactggagcagttcattggtgtatttctccagatattctccgatggtctggctgtagtaaaagctgtcatagtaccggtaatcattgccgttaaacagaaaggaggcattgcagcattcactgtaataggattcaaaggactggtcaattccccgcaaaagataccaggattcctcattggtgctctctgtatacaggatatctatgacagacctggctatttcataggtatcattaaactctgccagggtggtgcggtttcccgttttcatatatcctaatctcccgaaaaaattatacacaaccagctccctgatgttgtgaatccattgaaaatactaggtttttaagcattctctctttacaaatatgtgtataaattatataatataagaagaaatattatacacatatttgaaggagccgcgccatgtcgtcattggtttatgtcaaaaatccaaatggtaaaatctatgtatatagcaacgtttctgtttatgataaggaaaccaaaaaggtcaaacatattcgcaagagcatcgggcatctggatccagcaacaggcgaagtggttcccaaccgcaggaaaggcgatattgcccgcaaaaaggctgaaacgaaagaacctgctggccgctgtgttgttgaaaacaccggcatacagtcccttttggataaagctgtttcagacataggactgacagtaccgctcaccgcagtttttccagacgactggaaacgcatattgacgtgcgcgtattaccttgtcagcgaaggcggggcattatgtcatattgaacagtggcagcggatgtatccgccaccatgccgttctctgcttgcaagccggcgggtgagtgaactccttgtaaggctcacgcctgcgctgcagcagaactttttcagcaggtggattgatgtaaaccgccagaaagatgtctatgcaatggacatcaccagtgtatcctcctacagcgaattgattgactttgtccgttggggatacaaccgtgatggggaaaaactgccccagatcaacctccttatgctcaccggcgtcacttcccatatgccgctgtattacaggattattcccggcagcataaaggatgtgaacaccctggaggacagcatagcgaatatatccgttttggacagtccgacctgtcattttgtcatggataaaggcttttatagtgaaccgaaccttgacgcaatgtatgccagtcataagaagttcctggtcggagtgccttttacggtcggtttcgcttgcaaggcagtagaacgctacagggatagcatccgttcacatcacaattactgtgcagtctttggggacgaactgtacgcggtcacggaatcttccacgtggaaagggcatcgattctatatccacgtctaccatgatagtttcaaggcggcgacagacgaacggaattttgaccatatcctgcactgctgttatgaagaacttatggctggcagacacgtaaaggagcatgcctcgtattacaataagttttttcaggttcacaaaacacctgtaaggggcatcagggtggattacaacgaggaagccatcagcaggcataaaaggaaccatatcggctggttcgtgcttgtaagcaatcacatcaaggataagacgaaagctcttgaggtgtatcgcgacaaggatgctgttgaaaaatgtttcgatgacctcaaaaatgatcttgacatgaagcgtttacgtatccattcggcggcagccatggaaggcaggattttcatacagtttatagcactcctgatcacaacccggttaaagcaggtgatgaatgcggctggatggtttaaaaatcatgaccttcaaaaagtaataagcgaaatgaaaactgtccgcagtgttagtataaatggaacacgaaaaaaatacaccactgagcttaccccatttcaaaaagacatttatgagctatatgggttgaccccctaaatatgtgtataatttggacgggattttaggatatattcctcaaacaggatgccgctctggaggaaatggtttttcagctccagtatggagtagtactgattgatctccttttgatatctggcattaaactggttaaacagagagtggttgtatatggaaaatgagaggaacagtatcagcatcagaagcagcactgcattgatttgggcacccactgaaaaacagaactgtttccaccagaattttagtttcttcatctgaacgctccttcgctgaatctaacctccggttcctcggtaagcgtttccacccaaatcttatggaattgctccatgctctgtttctggtattggtatgtgctttgtgcacacttttccacggcctccctgtcctctttggagagggaggtcaggttttccgtattaataatcatcacatccggaaggcaccatgcatcatttttagtgacaaaatgaatatactggtcgtagttattgcatataaactcggaaaatgaagactcagccccgtcgatattgcctgatatcagtgatttgtaggtattggtattgactgagcctgccagctcaattcccatctcccggaaaatctccgccataagggcggactcgctgctctcaatcttctttccctccagatcctttttgtccaaaaaagtgcagtccgtaccgtagaagcaccgaaaatcagggtaataccagaccaggggcgtgatacggtccatctggcattcgtccctcagggtttcctcattgttgcgtacccactctatctgtgcgtctccgcctgcaaagttggaagggacaaagaatttgcggatggattccacctcctccgacagctccaggacattgacgcgggccatggcaataccgccgaattttacctgttcaatgatttccgtgggggttcccaggctgccgttataataaatcttgaccgttacccgtccttgggtttcccggctcaccatttccgcaaaataagccatggcccgggcggagggatgattctccggcatggtctcagccagcctcaggattacggcctggctctggggaagggacggactatccgatccgcaggcaggcgcgcagccggtaagaaggaccgacgctgccataagaaccgctgccagggcctttgtcagggctgaggctttctgcatgggaatacgtggatgaatgtttaaagtcacgtgaggctttcctttctggaaactaaattttgcggacattgtatcataactccctcctttccacaacaccaaataccctcaaccgaagctgagggattttggatgccgtatgattttattttacaagccccagtacattagggatggtcatggagatggccggtacataagtcaccagtaacagtatggccgctgtcactgcaaaatacggaagaagcgtcttaaatacttcctcgattttcacattcgccaccttgcagccggtaaacagaataggtcctaccggcggcgtgattgtaccgatacagaggttgaatacaatcatgattccgaaatggatggggtgcatgccgaagctggcgcaaatcggaaggaatataggtgtaaatatcaggattgccggggtagggtccatgaaggttcccaccaccagaagcagcaggttcataatcagaagaatggcaattttgctgttggtcagtcccaaaagtacatccgcgataatagcaggtatattggtaaagctcataatccagctcatgatggacgacacgccaatcatgaatattacgatagcagtcatctttacgctgtccagcagaatcctccttaaatcccttatcttaatgctgcggtagataaagctcagcagcagggaatataccactgcgatagcggaaccttccgtggccgtaaaagcccctattaaaataccgccaataacaattacgatcaaaagcaggctgggtatggccgcccacacggtttttaacacaatggccagggtgatttcatcccggtttctgtatccgcgtctggacgccataatacccgcaatcaccattactccgattccccacaaaaggccgggaagatatcctgccatgaacagcgcggagattgacacgctgcccgcaaccgtggagtacacaatcagggtattgctgggaggaatcagcattcctgtgggggcggacgcaatattgacagccgccatataatcctttgagtaaccctctttttcctccagaggtccgatggttccgccgatagctgccgctgccgccacgcctgaaccgctgatggcgccgaacagcatattggccaccacattggtctctgccagggctcccggcatcctgccgcttaaaattttcgcgcagttcaccagccgtatggcgataccgccgttattcatgatattccccgccagtatgaaaaagggtattgccagcaatgagaaggaattgacgcctgtaaataccttctgtgccgctgttcccatggcattctcaaagggaagcacgaacagcatggcgatggtggaggccagaccgatgctgatactgatgggaatgcccaaaaccagcatggtcagcacgcagaccagcataaccagtgctacaagtattgcctgatccataattctatctcctttgttcttagatttctctcagtttttttgccagcttcatctcgttgtagataaaatagaagaggatgaaacatgcgcttacaggcactgccgaatagataattcccatgggaatctgaagcgccgcatccatctggatcatttggcttgtaacctgcttatagcccccgaatatcatgacgcctgccgcgaataaggcaaccatcagttcacccagcatttcaacaaccactcttgtctttgaaggcatatggtcacggacaaagccgatattcatatgctcccgcagtccaaacacataggcggagccatacataaccatccatacaaacatatacttggaaagtgattccgtatacgcgttgggactgttaaagaagtatctcacaacaacctggaaggtcaccaggattgtcatgacagccaatagtaccacacatacccattcgataatcctgtccaggattttctttgctgattccatgagtcatgaccccgctttctacaaatccctgttagttggcaaggctgcgaatttcctcgtataatgcctttgctccctcgctcttgcttgtcacattgtcgataacaggctggcatgcttcctggaaaggagcgatgtccacatcgataaactgggcgccggcttcctctgccgtattctttgcaccctcaaggttctcatcccacagctggaattcacgttccgtgtactccttgcagagatcctttaaggtctgctggtcctcttcgctcattccctttaaggtggctgtattcataaccagaagatcaggaatcatcagatgacgtgtgtaagagaagtaaggagccacttcataatgctttaaatccgcataggtaatttcattgttctcaccgccgttgattacaccctgctgaatcgcggtgtaaacctctccctgggccatgggtgttcccactccgcccattgcatccagcatggcgatacaggtctgggattccatgacacgaatcttgtatccctttaaatccgccggggtctgaaccggcttgtctgtataaatgcagcgcgctcccgctgtaaaggccgccataacgctgaaattattggcttctgtactagcaaagatatcgtccagagcaccgctggtaaatacctttttctgatgctccacgctgtcatacgcatagggaagacccagcacggcaaaatcgggatttacattttccacaatagagtttgccaccattgccatctggatggtaccgctttgaaccagctcaaacgcatccttctgtgagcccagaagctcgttggggctgatttcgattctatatgctccgccggtagcctcatagaaagcatcgctcatctcggacagggccagatactggggatgcttttccgactggttaaaagccagctttaatgtagttgtcttcacatccttttcaggcgccttggcctcgtcatccttagtctctccgcctgcggccggtgccggggctgtggtcgcggatgcggatgcacctcccccacatgcagtcaatgacaatgcggttactccggccaataccaatgttaatgcctttttcatcataatcttttctcctgttctcccctttgggattcttaacgttttctttacaggaagattataagcttttccgcttcagattgaactacaaaaaatgggccatatcctataagaaataagacatgaccgcaagatattgatagtatggaagggctatattttatagttttaaatgatcagaggcgctacttatgatacggctcccccgaaataatcctgtaactcctgtagatctgctccaacagcaccaccctcatcagctgatggggaaatgtcatcttagagaagctgagggcatagtccgcccgcttcatgacgtccccggataatcccagcgacccccctatgacaaacacaatatggcctaccccatccactcccagcctctgaatcctgccggccagttcctcgctggtcagcatcttgccttcaatggccagggcaatgacgtaagccccatctttaatattagaaagaatgcgctgtccttccttttccttgatctgccttacaatggcctcgccggccccatccggtgttttctcatccgccacctggataatgtccagcttgcagtagcggctcaggcgcttggcatactccctgatggcatcctcaaaataccgttccttaatctttccaaccgtaacaagggtaatcttcatctgctaaaactccagtatcatatcgtaccacacagccccgccgtgaacggattgggaaatgcccatattcacatatccgaaggtttcataatacccaatcagccggtccttacaggtaagaataagccccctgcgcccctggctcctggcccgttcaatcatggcctccatcagacgggaggccaccccctgatgccggtattcctcaatcacatccaggccgaatatgctctggtaagcgccctccggctcatggagcgaagtatcctcaaacatctcgtctccaatggtcctcccatttgtgacagcgccattgataaacccgatgattcggtttccatcctcagccaccaaaaagctctgaggaaatacatccagacgttcctttaaactctttctgtctgctgcctccgctgccgggaaacaggctgcctccacctgtgccactgcgtccaaatctgccggcaccgctgtccttatggtaatggcatccatcttctgtcctcttttcgcatccttcgctgttcttaagcctttaccctgaaatagtatcccacgccccacttcgtatgtacataccttgggtcgctgggactgggttcgattttctcacggagccttctcacatggacatccacggtacgcacatccccgctgtccatggccttatttccccatacataggtcagaagcgcttccctgctgtataccttattgggattgcgcaccagcagctccaacaagtcaaattccttggccgtgagattgatttcccgctcaccgataaacacccggcggctctccgtatccatcttaaggtcacctgcgccaatgacgccggactgcggctcttcccgcttctgacgtttgctcttcccgcttcttcgtatgatggctttgattctggccttgacctccagtatgttgaagggcttgctgatataatcatcggcgccgtactccagtcccagaatcttatccatatcgccgcccttggccgtcagcataattatgggcatatccgaaaactcacgtatggcctgacacacctcatagccgtcatacttgggcagcatcacgtccagaagcacgatatcgtactctgtcttttttgccagttcaatggcctcctcgccgtcatatgcacagtccacttccatcccgtcctgttccagactgaagcggattccttttacaatcaatttctcatcgtcaaccactaatactcttgccatgttccattccccttatctatcattaaacggcggcctgataaccaaggccgcctgccatcatttacactgtaatactgtccttaatcttttcaaatgcagcgtccttgataccggatacattcatgatatcctcaatggacttaaacccgccaaacgcttcgcggtaatggatgatgtcctctgccctggattctccgattcccctgagggtcatcagatcctccttagaagccgtgttaaggttcaccatggccttagcgccgccttcgccggtccccgtcctgccgggcgtctgaacgcccgctgacacagcacccgcggatatgcctgattgggtcagcccccgggccttccattcctctgcctgctcacggtccggcacctgtatcttcatgccgtcctctaacacctgggccagattcagataatccggcaccgctgcttccgagaatcctcccgctgcctcaatggcctcatataccctgctgcctgcgggaagtccatatacgcccggcgtacacaccagaccgcatacatggatatataccagaggcatatcttcccggggcggcatatcgccttcggacagcctgcctgcctgggacggcacgtcctcctgtcccggcatacaatcttgtccccgcagatgctctccatctgcgcccgcggacatggtcccggccccgccctccggttcatcccgctgccgggggctttccatccccgtacgttcctcagcagcagtaccaccgtcaggttccaatgccatgaccatattttccagtccaatatcccggttcttcacactgcagctatagcatatgcctgcagccaacatacatatgacaatcactgccagtttcaatgctttgaaagatgtaagtttcatcttgggcggtatccctccttccagagagcaccgtcccagcctgtactcctattctatcggaaaccccctgcaattacaagcgttagtttccaaattttatctttcaaaaattacaattccgcctatggcaatgactgccccgattatcttgttccatgcaaagggagccttctccacgccgaacagcccgaacagctcaatggcatacgcaatgataatctgcgagaccacaatcagaagagccgccttggccggtcccaggcttcccatgcttcggatgaccgtataggtgatgagggctcccatgataccgcccacaagcacatatttgggcgtaacctgcataatgccggccacgggctcccttcctgtaaacatccatatgaccacgcaggtaataaaggccgtgagctgtacccatcccgcggccacccagacgctggtctgctttgtcacttccgtgttaaatacgccctgtatgctcattaaggcgcctgacagcaatgctatgataaatcccatgtattattttcctgcccttccacttattttaccgttatcttagcattcccacaggtttctattttattctggcattctttccgcatatgatgtataatcgttccgtcaggaggctcagctatgctatcattcataaaaacattactacaggctgccgcatggcccatccaggcacctgaaccatactccgcctttcacatcctgctctgcgctgccggcataccgcttgccgtctttctggcccggcgcctggcacgcatatgcctgcacccccgcggtgtgctgtttatctgcggcctgattttagctgtcagcgaactgtataagcagagcttcctatattttatcgtcagccagggccagtacaactggtggtattttcccttccagctgtgcagcgtccccatgtacctgtgcctgattcttccgttattcaggcacccgtcccatcgctccacggaaaagcgcatatgcaccttcatgcaggattttgcccttttgggaggcgtcatggcactggcggaacccagcggcctcatgcatccctatctgcttttgacgctccacgggttcctgtggcattttatgctcatcttcatcggcctgtactgcgccatgaccggcctgggaggcaggaccccaggcgactttgtatccatgctgcccctgtttttggcctgcgtgtgtatagccacgttcataaacgtggtttcccacccctacggcaacgctgatatgttttatatcagcccctattatccaaacggacagattgttttccaccagattgccctcaccataggtactgccgccggaaaccttctgtatctggcagccatggttctgggaggctttatctgccacctgtccctgaggcggctgtttccccggtaaccgggctgactgtttccccaaccgggccggctgtttccccaaccgggccggctgtttccccaaccgggccggctgttccccaaccgggccggctgttcccggtaaccgggccggctgttccccaaccgggccggctgttcccggtaaccgggccggctgttcccccaaccgggccggctgttccagccagacggaaggcggcttctgccatgccctcttaccattcctcaatacgttccctttttcaaaagtttgcgcagataggcaaaggcagtctcctccccctggtccttcagcatatggagaagcttttccaaaagcgctctggtctggggatggatggtgatgtaattctttgtatactcgtagtattccagcggagccgcgctggtataggcttttcccttatacacctcacatgcagctatccggtcgcagaccatctcggccacataccgcagcggcatcttattgcccaccaggccctcctccttatggctggaaatatcaatccaatactcataatgatgcttattcctgcccttatggtggagccaggccctggaataccccacggtctcacgctcagccgcattggggctgcggtttccctgataatacctgaccccggtccagaactcttccaggctgtacttggaaagatcatgggtaagcccctgccaatacaggccaatctggaagcaatgcttcctgaccaggtttctgtgccttgtaatggtagaaaaatggttccatatattacagattttcattcaaatcccttctttacacattaatactcatagcgcattgtattgaaatatgctttagtatatcataaaactcacctttttgcctgtatttcttcatattttaacctttgaacaacagaatctgaggtttatataaattgtttatacttaatgcccaaaaacgtttgacacttttcaacatttatgatatccttaggacagttgcgaaatagcttgcaacatatcacatttttttattttttatattttttggaggtatcgtaatgaaaggtacagttaagtggttcaacaaccagaagggttacggatttatttccgacgagcagggaaacgatgtattcgttcactactcaggtctgaacatggatggcttcaagtccttagacgagggcgcagaagttgagttcgatgtagtaaacggagctaagggtcctcaggctacaaacgtaaccaaattataatcaatgaacaacagtgtacctttttcaaacatatatcatcactgatagaggttgaagtaagttatatctgatttcaaatgattacaagtgagagccagtcctgcgactggctcttattgttatctctttaaaaaaccggttatatccgcacgatattcctgccctggcgccctatctggctttcttcagcatatccttcagctcatccacggaaaatgtgtaattcttattgcagaaatggcagttcacctcaatgggcttgccatcctctatcatttcctggatatcctttctgcccacactgatcaatgccttctccacccggtcctttgtgcagttgcagtaaaatacagcgggaagccttccgccggtttccaggccgaattcgcccagcacatactccagtatcatctccggcgtgttgcccgcgtccagcagggttgtgatggacgaaatctccttcagcttgttttccagtctgccgataatatcctcggaagctcccggcatcagctggatgatgaaaccgccggactggcgcaccgtgttgtccttattcatcagaacccccagcgccacggaggacggcgtctgctcagaggtggcgtaataatacgtcaggtcctccgcaatctctccggtcaccagaatggtctgtcccacatatggctcttttagtccgatgtccttgataacacttaagacgcccacgcccaacgctccgcccacgtccagtttccccttttcattgggaggaagcatcaccatgggattaactgcatatcccttcacatttcccctggaatccgctgtcacggtcaggccgccgatgggtccgtccccctgtatcttaagggtgagaaggtcatcttcccccttcatgtcacatcccatcatcacaccggccgtcagcagcctgcccagggcagccgttgccaccgggctggtgttatgggatattctggcctgttccaccaggtccctggtggtggcggcaaaggccctgatctgtccttctgccgcagttgctctgattacataatctgccatacgatttactcctcgtctctcattgtctttccatgttccctcatgattatatagatgcgttcgctgtcctcccgcacaggattggaggtgcatgcgtcgaaagcggcaacaaactccatgccggcctccctggctgccctcttcacctcatccaggctgtaggccctctggaaatgcgtctcttcatacttgcggtacaactcgccctcacggataaacagggtaaggtcgtactcattgattccggaaccttcatcgtaaaaattgtcccagataaagctgctctcctccctggcctccgcaaaggtattatctgccagcaattcccggtatttatactccgtgttcaggtcaaatataaatacccctctggggtccagataattattgaccagccggaacacctgcaccagatcctggtactccataatatagttcatggaatcacatatgctgacaaccgcccgcaccgtgccgtaaagctcaaactcccgcatgtcctgaaggagataaagaatgtcctgtcccgagaccgcccgtttatccattgccatctgaagcatttccccggaattatcaattccaatcatatcatacccggcttctgcaaggagcccggtaaggcttcccgtgccgcagcccaggtccagcaccaggccgttttccaccccctgctcccggagcagtccgattacataggaacaccactcctcatacggcacattgtcctgaaaaatgtcgtagacctccgcaaaactgctgtatgcttccatgtcctcatccttcccaatggcgctgcgtctcattcccgcagccatcaccgaatcatcaatcgagtaggaggcggtgattaaccgccgtcctctcacagcaccgtacgtacggttctcgtatacggcgctttcaatagttggtgtgcagagactgataggctgcggctaagtcataaaagccccagtttatcagtctttctttacttaatgcccagttgaccgccttgtttccggcattgaaccagtatcccttgcggtcgtaggctattgttgccgcataatggctgtctactcccagtcctatgagtttcctcattctggttttgggcagtttccactgtttccagatacacatccgtatccggcggtacaaccatccattcaggctttcgatgtttttcttcatgtccgctatcccatagtagttcagccatcctctcatgtagacttttatcttttccttggttcggatgatactcccgcacctgctccgggaagtaagcctgcgcagtttctccttggctttcttccatgacgttccatggacacggatataggtccctgttccgttcttcccaaaacaaaaaccaaggaacttaaaattttggattgcgaacacactgaccgttcggctcttttcccgattcactctcagtttcagccttgcctccagatatttcgtgctggattccagcagtcgttctgccgcccgttcgctctttgccagcagtacgagaacaactgccctcgtgtatccctgttcgatatactcctttatcctgagaatggcgtcttttgctcctcgtcccggacgatagccgaagctgtctttcgagaacaatggttcgtagattggcatgagctgttgaagcattgcctgctggatgatacggtctattacggtggggataccaagctttcgtatccctccctccggcttcggaatctccacacgcctgactggagatggggtatacttccccttcctgattctctctaccagttcatagttattctccctcagccatggtaacgccgcttcaatggtcattccatccactcccggcgctcccttgtttgccttcactcttttgtaagccctgttcagattttccttgttcagtatcttacttaagatgtctggctctgcactgtctctttccttccatatccggttgaatgagcggtgcgctctcacataccctttgcgttccgcgctatctctttgcgagcagctttctctgttttctgtacccatctgcccattcctcctttccctgtcgtactaaagactcctattgattcggtccttcactgaaaacagctactatgacctctgctgacttctgtacgctcagcattacctctcggcaatggttactcctttcagagcattccgtacagacctccctgggtaccacacgtttctttccctccatctatctgccgcatttactgtacacgattccgtgtagctatcgggcttcatcttgtgttgcagacttaccctcatgtacagccttctatacggtttctgtccgtcagaccagaggtttgcccatgggttcgttccccacatccggcttccttcagatttgcagtcacctgcaacacccttgccttcggctatatccttcccgctaccaggtggattcaggactttcacccgttagaaacgtgcgccgccaggcgcacaaatcggataggggagattttaacctccccttccacaccacgtagcgtaccgttcggtactacgcggttcaatagtttactcggactttcagatagtgggcagtcatatcgggataaccaagtctgtccactatgattcttttggtgagtgccgagttgagcattcccgccgctctccacactccctttcggcagttcgccatctcatgcaccttccactctggtaaatgtaacgcccgcaacattttatatcttgtgcgtaccttcttccattgtttccagtacaccgctcggattctgtggcgcagccactcatccgtctgttccatcaggcttttcatgtctgcatatcgataatagttaatccatccccttgcatagcttcggagtttttcttccctctcctgattgctccatttgttccctctggttgtcagctcccgtatccggttcttcatttttgccaccgacttcgggtgtatcctcatgcggcatttccctttatgccggtaaaagccgtagcccaggtattttatcttgctgacgtggctcactgtcgttttctgaagattgactttcagaaacagttttcctgtgatgaatggcacaatgttttccattgtcctctctgcgcttttcctgcttttgcacagaatcaggcagtcatccgcatacctcacatacttgtgtcccctgcgctccagttccttgtccaactcattcagcatgacatttccacataagggacttagcgggcctccctgcggcacgccctcggtcgttgcgtgaaatcctccgtcctccattactccggctttcaggtacttgtgtatcagcgagattaccctcccgtccttcaccgtcctcgacagcacctctatcagcttgctgtggttcaccgtgtcaaagtaggattgtaaatccatgctgaccacgtagacatatccttcgttgatatatttcctacatctttccagtgcgtcatgcgcccctctgccgggacggaatccgatgctgttgtcagagaactgttcttcatataagggcgtcagttcctgtgcgattgcctgttggattaccctgtctaccactgtgggtatccccagtttccttgtttttcctttctcctctttgggtatttctacccttcggactgggtttggcttgtatttgccttccctcacctgctcgaccaattcggactggtgttctctcaggtagggtagaagttcatccacctgcattccgtcaatcccaccaacgcctttgttcgttttgaccttcttataggcggcatttagattgtcgcttctaagaatcgtatctagcaggttgtccgtccgaaagtccgtgttggtgtcggggttcccggtaatcctttcatgggcgtactctcctgtttcccttccctgttccgcaggtatctctcgcaggtagtcctcaatatgaagttgtctgtacttaattccatgtccggtttccatttggtaacgacacctcctactgttcagtccttcccggtgcgtttgcgaccgcccggtactatgacctctgctgacttctcacggcaagctttactccgtgacagcgaatgttttatcgccactttcacgtccgtgagacctccccgggtactcacacgttctttcccacttatacctgccccgtttactgctggcgttccgtgcagttattggactttagtttgttaggcaacctcatccacgcttcacagcctatccggacaacttttacaggccagtggtttgcctccggcttccttcagaccccacctcacgatgacgcccttgccattggctgcacccttcccactgccgggcgggtcagggactttcacccgttagaacgtgcgcccgccgggcgcacctacaaaagcgcctgtccggaacagttccgggcaggcgggtaaaatcatgggctttatgtgttctttccgcagcacttcttatatttcttgccgcttccgcatgggcagggttcatttgggaaaatcttcttacccttgcgtactgtaccggaagccttctgggatttgtacagttccttgcgcttgtccggagtaagaatctcatcccactgtggaagctcatacagccagttagcctttgcctctaccatattgtagtacagcttctccggatcaatctcaatcttaacctcggtatcctcttccatggtatcaatggggttctcataccccttcaggctctcattgattccatccaggaaaccggtcataatgaggatttccgtattgtacttctctgccaggccctttacagtgcctgtgataacctctgttgggttagagagaatctgctcatagattcccttctcaatctgaaaatatccagcccacaattcttctttctttttatcatccaggccgtcgccgtaagccagatttctccatgtctctaacagtgccatagtaaaaccatcctttttgtattatttatgttccaggggcttcctgttccgggcgccatgcctcatcctgtctgccggaccgctccgctgcctgtccatggccgcccataacccttagtatataacaaaacataagatttttcaaacatattttatttttatacaacttttatacaggtaaatacaccctaatcttaaatcatttcccttatatcccaatcctctgtttttgtttcacctgcagataaagggtattttttctgtttttctgcaaataatatacctgaatccaattcaattcaaaaggaggttttaccatgaaagtaaatggaaaaaacgagagcatcaaatgtaccatcaagaattgtgcttacaatgcacagtctgaggattactgcacccttgacgccatcaaggtcggaactcatgaaatgaacccaaccaagaaggaatgtacagactgcgagtcttttgtaaataaggcccagtaattccaatcccggggactgcgtccagacaggaaataccgctgtctggcacagtcccttttttctttcatttatcagatgatagcacattatccacagctttttccacaacattgcggataaacagacaaattcggtgattcatccgcaaatccgacaaaaaaatcaaaaagaaaaacatccgcagtgatatgataccatcaatcacagcggatgctttatatattaacatggttttctctttgtatttggccccattccttcccgcctggaattatgggtctggttctggttctccggcttcaccttttcagtaatggaagaaaaatatgtaaaaaaaattcaaacttaacttgtattttttcccagccgtgctataatcaaatctatggggacatagctcagctgggagagcgctgcgttcgcaacgcagagaccgcgggttcgaatcccgttgtctccattgtttttaaatccacgtaattgcgggaaacaacgtaacagcgtgggtttttgattgtctaaaatcattgtattatccttatatgggtatgaaaatatgcaaatatagcgcacagtatcacacgaaaacagcgggtccggctgcatccggtacccgttattttactgattaatttttatcctgctgctttccaaatgccaaaattctttaccacttaaccctgcggatagcggcagccacaaagggcaatttaatagacaggcccacaatacccagccgactatagttacacacttatttaaaaacagactttatgaaatgcaaaaaaatcagacgtcattgtctggctgttgtattccaaaacccggtacactccaattctctaccatgctccaggcggctccgtcacctgacttttgccgtactcgaatatcgccttgtaaaaatccttccccttgtccagattatatttattgtaataaagccgcacagttaatttgtcaggcgttccattcatcgcattatgccgggaaacaattccctgaaccttatggtcaatctgccaaggtttgtatacgatgacatacaggtccgtttctctgaaatccgaaccgctataggagaataccttatagattctgtaatcaggcagccgaatataacaggccgtcagtgccaatactgtcatcaggcctgccgcggccagatatttccatatttttttcattcctccccctccattacttatagaacggagaagtgtataataattccctttgttcggtcagtatgcttgtattttttgatatatttccgacattcataatgtcacgagaactattacaataattacaatagaacaatacacaatatgaaaaaaggctccgaagcagcttataattttggtctcagagtgctctttatagtttattgcaagaactgcttgccatcttccccgcctatatggtataattaatctcgttggagacatagctcagctgggagagcatctgcttgacgtgtagagggtcgcaggttcgagtcctgttgtctccactatttagaaagtgcctgtacgcaatctcttatttgtcacaacatccgttttttcatatttcagtttcatatacaaaaaagttccatccgaactctgttcacagccagcaatcctatatctgttcccacttctggcaggagttcctttcaattctccctcctctgactgcggtatgttttcaggattcaggcctatacatatgacgtgcatcctcaagcttccatgcaccattttcatcaatcgtatagccgactggtgtaaatgtatcattcagcatacggataaatccccgttcattccctgtttccacgtttctgcgaatgcttcttgtataaaagtgcccgaaataaacattacaaatgcaatcgcggccatccatttttttactttcatcccttacgccttctttaatcacaatcatttgtatccagttaacaaatttagccattcctatttgcctttagtcctaaatatgggattaaaatatctctctttcaatatctgtaatctctgcttccgtattctcttctataaaataccgtattgcttccataacactatccgcttgagcgctattcggtacgatagatgccacgccaatgacaattgtctggtgtatatcctgctctcccacctctgccacggccacgttaaatttgttccgcaccttagacagcaagcttttaacaaccatacgtttttctttcaatgaatgaacccagggcgcatggagcttgatttttaatgatataattagcattgtatttacctcggaataatcgcatttttgaaacgaataaagaaccgtcctccggcaagaaaacagtccgcctcatatctgatacatcactgtacatttactcatcttttgattgcaaaacattcctttttaacttcatccccgggctttaaagccaaatattattaccatcccggagtaacagtatcctgattcaaaaaatcttattgctcacctacaacagagccatatgattgttctgccacttatccacaatcataataccaccatatatagataaacacaatatcaatcctgattatcttgtgttcgcagtggatactgtggataagtttgttgataacccgtggattaaatgtggatgcagactgtttcctttcctatatttctccatccatacttaatttatctgcattttatttatcacctatcaccacaaaatattgtcccatgatttataatgtagtatgattaggatatattatctggtaaatgggtctaccaatacatcggtagtgtcaagtaatctatgaaaactaagccggaaaaaatcggctcaaatgaaccttgaaaactgcagatataccaagagccaggccctccgggagcttagggcgccgccctaagaacttgcaagggacctgtcccttgacccaatatcgggctctgcccgaacccgtcctcgccggaaggcaggaaaagggcgcacctgcccccttttctgttttacaggattatccgtgaaccttatgtcaagaggctttcgcggcatatcctcgcactttgtgctccggtattccacggtcctcctgacaacagttccgctccttttagactgcggctgttttccggagatttaggatggtctgctggcccagaaagatgagaagctgccatttgcccggcatgttgtctgctccccgcaggatttccacatcattgagcacatggtagttgttgtgtttatgagggcgtagaaagttgtaataagcgacccacagggcaaggtcatagttggctccatcgatggtgtcaaagccgttggtctttcgataggaagccttgtaggtgcggttaagccgttcgatcatctgcttaaaaggccggaattctttggagacggcgtcatcattggtaagcccgatgacctgggtgatgtggaacttaaaagcatcgccgaattcatgaaagaactgctgggcggcaagaggatacgcactatagccatcggcaataaagcggaagtttttgggaagctccttaaagtggcggaatgccatgcgcatggccatgatacaggggccgacgccccggttatctgagaccctgtagccgatgatggagcgtttggcggcatccatgataaaccagatataagatttgatgccgcgaactttgatgtaggtctcgtcggcggtaaaggtagtgccagcgccgtaatcatagttatcaacaaagggcttgatacagatggcggcgctcttgcagtagttagcgatctgctgatgagagatttggatgttgtagaggtctttcagggcctgggaagtcttacgcagagaaagggaaaggtttacatgaagggtgaggcacagggacatgacatgggaatcgaacttattgaatttgagggaggaggcattctttggcagggagtttaagtccatgcgaaagaaatctatcgtgaattcgcggtagaggtagtgaagcttgtattcatttttgccatagtctttctccaggtgttctttatcgacgtttttgaggttatggagatagtagggacatttctggttgacgcatttgtggaggatgaagtgtttccggtcctttttgtggacaagggcatgtccgcagtggggacagcgcagggtatagtgcttggagaagcggttatcatcagtagagaagttggtatcacatactttgcattttaactgtcctttggaaccattattacgataaagaaaaggctgaggagcatggcaggagggacaggtacagtcaggagagatatcgcattccttgcgccgtgcaacaggccgaatcttcttatggtatttatattcgaagtaagggatgaggagctgccagtcccaatcgttttgatgaaactgaagcatagggagttcatcggttctgaatttttggtatttaggggaatgggaatcatcaaaagcccattgtttgagagggatatatttgcagataaaagtaatgagccagcagttctgctggtaaagaaattgaatgagtgacaataaataggtaatactattcataagcaatgaaattcctttctgtgtttgtgggattggtttacctaaagtattgacacaaaaagggaggtcattgcttttttctttgaaaaagtggtgtaatccctaaaaatacaaggtttgtaacaaaaaatgaggtagtaaacttgacactaccaatacatcacgggaggtattaaaatgaaattcttcaccaaagcactcatcatcctggcggttatcctccttatattggcattaggcgacagcatatttaatggtcttttcaacaatgacggatatcgtcccgtaacccagcaaatgaaagaggtcatgacaggagcccagtaggttccttttttgctccttttaatatcctgtcactgatattcacaatcttcttacaaatcgttcatattttcgctacaggatgctcatatttagcccatatactatattttgtaagttgatattgctaatcatactttttttcataatacagccggcaggagaaatcctgaccggctcctccctttttacaggctgcttttgacctgtattcaatcttccacaccttgtccatccgtggatgaggacttcagattcaaataatatctgacgcctcctccagattaaatctgacaaaaataaaaatattccacctcatttatgataatactcatatttggattatccagcaaacttcttgtcctgtttatgacatttatgagcgacttcttatatgttccaccatcagccacctccaccgggttcctgacagccgagacacaatgccctattttccccagttggcagccgcgtatctcaccgcatatcaggctgtgtgttgtcacggtcccggtgacatagattcctgtggaaccgtactcctcgtccgcagccttttacaatatcttacataccgcattcattgcaggtccacatatcttaaaacagattaagaacaaatatactgtattttattcctccctgcctgcctgctttatgatttgattgacatatgtgctcagccctgccagcagaattccctgggttatggcggtaaatattgccataaaaatttcctggcccgaccggcatgtacttgtggcaagcacataaatcccgcatatgacaattcccaggcccccgttgatcaatgggatatatctgtccttaaccgcctcactctgtttaatccacatgcccacgaaatacagcacaagagctaccacaattaattccggttttatataatccgttatctgcatatacattctccttccgttacttttcttactattagtatattaaacagaacaggatttgacagtccgaagcacaaaaaagagaagccctacggctcctcttccattttcccataaacctcagtatctgctttctgtctcagcgtgttaggccccagatactcgccatcgtgccacctgggattgaatgtctctacattctttgcctgctcctccagttcttttgtggatttctgctctccctgcttcattatcatcacctctgggatagtatgtaccatgacagtccgaaacatgtatcgaatatacagtcccaaaaagcccggccccggggataacattgcgacagtatgtcagcttctaaactgccagcccggtgatataatagaatatatgcctgaacaataatggtttctgcgaggtattcccagctctgtttgccgtgttcctccaggcagagaatgaaaagaataaactattataaaaaaccggccctctatcaggaggcaggggtacgtgaatgctggattgtagacccggccagggaaattattgtgttttttgattttccaaatgaaacaccgcctaccatttaccgatttaccgattctgttaaagtcagcatatataaggatttttccatcgactttagccaattaaacctttgataccatccacattgcagcggaaccataacgggactgctgcttttttatctctttgcctttctggcggacaccgtcaaaactcttgatagctagtacagcattgccaaaataataatgaatagacgttgcttttttattgtagtcggtgcataataattctatcactaaagaatggatgggttattatgcgaaggaaaacaattgatactatcccggttttatctgatgccatgaaaaacatattatctgctttttcaaaaagccgctcccttccgtcaggactggtcaaaagagccagcattgtcctgcttgcgtcacagggggaactcaaccagaatattgcaccacaggtcgggcttcattataataatgttgccacctggcgcagtcggttcctcgcggcgctcccagccttgcggaggattgaaatggacgccccggaaaagcttgaagatgagatacgggcagtcctgtccgataaaaaacgccccggtgccccgtctgtttttacgccggaccagatcatgcggatcatcgaccttgcttgcagcaacccaaatgattttgggtacgaagtaagccagtggagcctcccgctgttagtggcagaaattaaaaagcaggggatcgctgaacagatttctgagaaatctgtcagccgttttttaaaaatgaggtagatttacatccccacagaatccgttactggcttcattcttcggaaaagacggaagccccggaatcttttgcgcggaaagtaaacgaaatctgcggcctgtaccagagtgcccaggaacaaagccgggaaggtgcacacattgtttccacggatgaaatgaccggggtacaggcgctggaacataaatatcctgacaagctcccattacccggccagtgcgccaaaatggagtttgagtatatccgccatggcacgaccagcctcatcgggttctttgatgttgcaacgggccgtatggaaatgccgtatttaaactccacacgcacagaagaggattttgtggaagccgtgaaagcattggtaaggacagacccgcaagccccatggacatttatatgcgatggcctaaacacccataagtcggaaacccttgtccgctttgtggcagaagcctgtgcccttggcgtggaactgggcaaaaaagggaaaacagggatccttaaaagtatggaaagccgggcggatttcctgcatgacccttcccaccggatccgctttgtctatactccgaaacacagttcctggatgaaccagattgagatatggtttggcatcattaaccggaagctgctgaagcggaaaagctgcctatcaatagaagaactggaagcaagcatcctgcgctttattgaacaatacaatcttacagcacacccatttaagtggacatatgccgggataccattagtaatttaatcactgatatttaagcaatactgtactagtatcaatttgtctggccggaccgtgtcctccgaaatcccctccgctgacgtccgtaagaatcggaaaaagaaatgctgctgaagctctaccgcctaaaggcggtggtttataccttaggcttggaaaataaaccaggtattaaacggaaggataagtatttcctactttctcttttatgatattcctagtatgactctattttaataagtttacattattatcctgaaatggtataatacttatagaccatttcaggaggtaaaatgatgccaaagagtgctacgcctatttttctttccaatgatgataagtcatatttaaagtccattctacagaaggggactgttgaagccagagtccacaggagagccaaaatcctcttattaaaatcagatggcatggcagatgaagccattgctgacaaactcgatatttcgagaccgacggtaaagctctgcctgaaaaaatatatggaatcaggcgtaaaagctgccatggaagacagtaaaggccgtggccgcaggattgaaattaccgatgatgcaaaggcatgggtaatcaatattgcctgccaaaagccttccgcattcggcctcccggcagagttatggtatccattgagccttacccgctacatcaattccgttgctgaacaggaaggatatccccgtatggcgacagcatctgagttttctatccggaagatacttaggaaagcaatgcttaatccccataaggtcacctattattgtgaaaaacgggatcctgactttgaaaagaagatgcatgatgtgctggtcatttacaaacaggttgaactccgctttgatgaaaatggaagtttgattccgtttgccggtgatgaagagccggtacatacattatcctatgatgaaaagcccgggatccaagcgattgccaccacaaccggggacaggcccccggctgccagtacggaaaaaatgtccaccgtacagcgtgattatgagtataaacgtctggggacgctctccctattggcagcgattgacctgttgaccggggaagctatcccactggtaagcaatactcataaaagcagcgattttgtaacattccttaaaatattggatgagaaatacccaaaaggggacaaaatacggcttatactggataaccactccgcccatacatccagggagacacaggaatatctgaatacagttcctggaaggtttgaatttgtgttcacacccacacatggctcctggctgaatatggtggaaggctttttcagcaaaatgacccgccagatgttgtccgggattcgtgtaggcccgaaagaggaactaaaggaacggattttgaaatactttgaagaaatcaatgaggttcccgtcccctacaaatggaaataccgcttggacacgattgatctttcggaagaggatgtgggcacaatcgtctatgaagttgtaaatgcgaaagcagcaagtcctgaaaaccaagggaaacgtgcgcccaaagcacggacacgtaagccaagaaatcagattactaccaatgcttaaattgtaagcttatttaaatcgagttatactagtatggcccttttttcaggaagacaaaacatttttatttttttcatgcatcttaagcggcatcatcaagtggtggagcatgatctcataagcctttgccttattgcctgcttttaatgccttcagatattcccggtgttcattcatagtcccagtaatacgtcccttcacggccagtgcatccagagaagtcaggcgtatcagatacaggagccgctggaaaatatggtcgaactcatcattttgcatatagtttacgagaagcagatgaaactgatggtcgtagtcaataaaatcctccaaacagtcctctttatcaaacacttcttccatatttttaagcacagcttccaaatcttttaaaagctgccttcctcgttctgtataaatctgcgacgcgatcatattggtacaaaatccctctatggcgcatcgtatctctatactgtctttcatatccttctcatttaactgccgtatcataaatcccttgctgggaataatggtgatataaccgtcctggctcaaagactgcaacgcctctctcatcggtgtcctggaaatgccgatttgagcagacagttttgtctcagagtaaagcacccttggttccagttccccggaaagaatactattttttatggaatcgtaggcatgtagctgcagcagactcttttctttcataaagtaaccatactttctttgcatatttctcatagtaaataaccattttatattaaatcaaattcaggattctgtcaagaaaatatcccctgttcctgataggcccgtctaaaaaaactcatgccaaatatatatctgacggacgcatcaagggccataaaaattgcacaaaaatctcgttaaaaatttgtctattatgcatcttaagtatctcttgacagtatcccggtatcccggtatactgtcaagagatagaatctaacaaaacaacacaagcaaagtcaaggaggaaaacaaatgtgcgtttatgaaataggcaagttaagagtggttgatttatctaagatcatcgatcctgcgaccgagaccagaaggtgtcatctgttccgctttaatacaggtggtgctatcccggatttccatactaatatggacctgatgagccatctgggaacacactgcgagtgtccttaccatcatgatgataactggccatccgcagctgatctgcctttaactacttttatgggccgtgccgtatatgtggatttcagggaaacggttgcaaaaagaggccacattaccgctgctgacttagaccgtgaggcaaagaaagtaaaggaaggcgacattgtcatcatcgactcttcttacaagctggcaccatttaccgcggataccaacaccgagaaggatcagcgtcttttgatcaatgcagagagcgctcagtggtttagggagcacaaggtaaaagcagttggtttcggtgacggcgtttctattgaaaactgtaatgaagatgtaaagccgttccacgatatcctgatggctgagaatatcgtattcctggaagtgttaaagaatctggaagagttaaaaacagatgtatttttcatgagctattctccgcttcctatcaagggactcgattccagccctgtgcgtgcatacgcgatcgagggacttaccgagttttctgaataaatacctgacgacagattgggcaacctttcgttgagggctgccctttttagcaaaggagactttatgagaattgccgtaatcggtgcaggggctatggggtccatttatggcggacgcctctcacagcacaacgaagtgatcttagtagatacaaaccaggatatcgtagagcatatcaataaaaacggcctgttgattgatgaaaatggtaccacaggccgctatcatccccatgcagtctgccatacagaaaaagaacagcctgctgatctggtcattgttttcgtaaaagcgcttttttccagaaatgcccttgaacagaatcgttctttgatcggatcggatacccgtctgatgaccctccaaaatggagcaggacacgaggaccttttaaaagaatttgtcagtgaagaccacattgtcatcggaactaccgaagataatggagcagtccttggtccgggacatgtcagacgcggaggaaccggcgttaccaatctcggaatgttgacagagaatgccggccagttcttaaaccatctgaaagaagtatttgattcctgcggttttcagataaaaatacatgataatatccaaaaactgatatgggataagctttttaccaatgtgtccttaagcgcactgaccggaatccttcaggtagatatgggatatattgctgctgatgcctacgcatggaagctctgctgccagcttatccacgaaaccattgaagctgcagctgctgccggtcttgtttttgacgaagcagcggtgatcgaaaaagtaaagaacacttctatccagaatccaaatggttgtacttctatccgggctgacctgcgggatggcagacgtacagaagtagacaccatcagcggcgccgttgtccgcacagcaaaaaaatatcatgtggcagtgcctggacatgaatttgtagtgaccatgatacatgctatggaaggaagaaactaacaaaagaggggaaataaactatgatcttttcatctatcaaaaaccacgacgtatttgaaacctatccagacgccatcaaaaaagctctggattatctggcaagccacgattttgcagctatggaacctggcgtatatgaaatccaggggaaagagatctatgctcaggtgtttgacgctgtcaccgtagagccggataccaaaaaagcggaatcccatgaaaaatatctggatgtgcagtatcttgtttccggtaaggagcgtcttggctttacaaaaaacactggagattatcagattgctgagcatatcaaggaacgtgaccttatcttctatcagtctgtagaagatgaaggatggattgaatcccgtccaggttgtttttgcatcttctttccttccgacattcaccgtccggagtgtatttccggcgaatccatgaaactgcgtaaagtagtcgttaaagtaagcgcagctcttttgtagaaagcggcaggaggtattccgatatgtttaaaaaaatcctattggctgcaggacttttatgtcttacaggaatgttatctgcctgcggtggacaaacagagcagaaagtgaccgagatccgagtagcttttaaccaaaatgaaaatcaccctcagtatcttgctatgaaggattttggtgaaaagtttgaaaaagcaaccaatggccgttaccatatgaccatttatccaaacggtgttctgggagaacagggcgctatggcagaatttatccgtaccggcgccctgcagatggccatcgttcccggcagcgttcctgaaggatatgatgcagactttgcgatcgtaggcgcgccgtatctttatgataacattgaccatctggagcatgcagttatgggcggagtatttgatgagctgttttcctctacggataagtacaaattccgcgtcctcacggtgtacaccgctggcgaaagaaatgtatacgcgaaaaagcctatcaattccgccgatgatctaaagggtatgatcattcgtgtcaatgacagccctacctatgtagaaatgaccaagctaatgggcggaaacggagccgttatggcacagtcagaagtttacaccgcactgcagcagggcgttatcgatgctgcggaaaacagtgagctggtttaccgtgactttaagaactatgaggtagcgccttactatgcctacacccgccacattgttcacccggatgtcgtccttgccagcacagatttcttaaattccatgagtgacggagacagagcgatctttgatcagctgataaaggaatctaccgaaaaagaatttacgctttttaaggaagccattgaacaggcaaagaaagatacggaagctgccggcgcacagttctgctatcctgatacagaagaattaagagaacgctgcatgccgttgcttcaaaggattgcagaacaatctgatgtaacgaaaaagatctatgcagatgtaaccgcactgagagggggggagcaatcatgaaaacattaaaacagggactggatcgttttctggctacagtctgcatcattgactttattggtatggtgctgctgactgtatatcaggttatcatgcgctatgtgttcaaaagccccagcagtgtcagtgaggtgcttgcccgctattgcttcgtgtggctcatccttctgtccgctacctgcgtattcggtcagagagaccatatctgcatcacctttttaaaagataagctgacgggaagtgcaagaagaacattagatatcatcaatgaaatcgtgatcatcatcttttccggcaccattctggtatatggcggcatggtcatcactaccatgaatatgcttcaatacgattctatcttaaaaatccctaccggaaccgtatacagcatcattcccgtctgcggtgtactgatcatcttttacagtctgtacaacctgcgcgagatttttaccaaaaaagaagggggagtataaattatgtctattgcagttcaggtagccattgtcatggtcatattactggtcgttatgcttgcagcgggcatacccattggagtaggaatcggtctttcctctgctgtttctatgatctgtatgctgccaggcaatgttgcttttgccacatccgcccagagaatttttgcaggctctaactccttttcactgatcgccatcccgttttttatccttgcaggaaatatcatgaataacggcggcattgctctgcgtcttgtcaattgtgccaaagtattaggcggaaaaatgcctggttccctggcacaggccaacgttatcgcaaacatgctctttggcgctatcagcggttctggcgctgctgctgcggcggctatcggaagtaccatgggccctctggaggaaaaagaaggttacggcaaaaattattccgttgctgtcaatgttgcctccgctcctgtaggaatgctcattcccccaagcaataccatgatcgtatactctacggtagccggcagtgtttccattgctgccctgttcatggcaggctatattcctggtatcatctggggtgccggcgtcattatcttagcaactactgcagcaaaacgattaggataccgcagctccagcgagctgacccttaagatcgctttaaaaacattttggcaggcagtaccaagtcttttgatgatcgtcatcgttatcggcggtattttaggtggtatctttactgctaccgaaggttctgccgttgctgttgtatacgctactgtgctgtctcttatctatggttctattaaagtaaaagatatcccaaggatcgttctggattctgctaagatcactggtaccatcacattcatgatcggcttatcctctatcatgtcctgggcgatggcttttacgggaatcccggatatggtagcagccgctgtcctcagtgttacaagcaataagtttttaattttccttcttatcaatgtgatcttactgtttgtcggtacttttatggacccaaccccggcaatccttatttttacaccaatcttccttcctatctgcaccagtttaggaatgagcgcggtacagttcggtattgttctatgctataacctttctgtaggaaccatcactcctcctgtgggaacgatcctgtttactggctgtaaagtaggcggtgtaaccattgaaagtgttatcaagcacctgctgccgtatttcggtatcatcatagtcggtctgcttttagttacctatatccctgtactttctctggggctgccctctttgttggaattgatttaaatttaaaatactaaaagtaccaattcgttcttaataatatataattttttacgggccactgctttatagatgggcagagcatctatggagcaacggccctgttatattttaatctttatcttaatactccaaaccccttttcgggcgagttcgatatcctcttctgttaccggtatcgaccagatatcatttttttcagagcgttcatcccagattctctgattttcttttacatatttcaatttcttccctctctatgtattgtcaagcaatctgttccttccgtgaatattctgtacctcattaaatttcggatttacttaatcagatttcatctgcgtcttctccattcacggcgcgtccgaatatatcccgaaccctcttaacaatcccgattatatgcctaactctcttccatttttcggaacacgaaaaactccaatgccttcaactggctaaagccacaacaaattcagccccggcacgccactggcgccggagctgatttaaaaaggggaggataagtattaattattttctctttcgtgtatactcctattatggccccatcccatagaattatacacatccgataaattttttaatttattttctcctccccgcttcttcctgtcatccccactcccctgtatccagttttattccgccaaactcctacaatatcatcatcagtgtcccggtaatcagcacggtgctgattactacggatatggagttgaccgcgcttgccagtcccacatccgaacccaggttgcctgtaaatgcaggagccgcagatgacatggggctaagggcaagtatggtcagtgcctgcctgtattctatcccaaaaggcagcaggaagtaaaagaccagtgccagtataatggccaatgaataccgtgccgcaagtatcctcacgattttcccgggctggctgctgtccccgtttaacttaaatccaaccccaatcatgagcatggccataaatgcatttgcatttccaatgactccggtaaatgaggtaatgggggcaggcagtgccacatggagaaacgacagcacagtcatgatgagatatgcgtcaaagggaagggatttaagcaacgtctttacaaccggcaaaaggctgaacctggcgtttttctcctttgtcaccactgccacgctgtaggccccgcccagacagacaaacgcgtttcccgtatcaaacagactggtcgccaccacacccacggggcccaggaagctctgggcaaagggcatggtaaaattgcctatattgtatcccggcaaattcagtacattgaatgcccgttcctcccgttcctcaccaatactcatgaaaaaggccatggtgatatacaggattcccccgccaaatcccagcagtgtcatcaccagcatggacggcttcaggtcaatccctgaaaaattcgatataatcgctgcgggaagggttatcttaagtacgattttcgataagacataaaaatcttcctccttaaaaagaccggctcttctcagcagatttcccattattatgacggccacaaaagccccggccttcgtcaacacttctgccattttatcatttctcccatccgtttattcttcccgccccggcttttgatttgaaaattcattctgcacacccttgaaaattcatttccgccaactgcacaccctagttataatatcaaaaacaacggcatactgcaataacaaaacaatatccgtcatagcccaaaggcagaaagaaagaccggccgcccaccccggcgccggtctctccaaatccttcatgaaacaacccttcatgaaacaacacacgtatatttacatacgtcccaatcctctgcctcctgtgtaggcagattcgtactacgaattcccgtatggcctatacatatcccagcaatcccggcagccacatggacagaatcggaacataggatacaagcaacagcacaacgaatatggctgcaaaatacaatagaagcggtttaattacattttcaatctttgtcttacccacctttacacccacaaacagcgtggttcctaccggaggcgtgatggtaccgatacacaggttgaatatcatcatgataccaaaatgcacggtattcatacccagggcctggcaaattggcaggaagataggtgtgaagataaggcaggcaggcgtcatgtccatgaatgtaccgataatcagcagaaggatattgatgatgaaaagaatcacataccggttgttgctgattcctaacattgcctctgatacggctgtggggattcctgtaaaggccatgacccagctcatgatgctggacacaccaatcaggaaaataatgatgcctgtcatctccgcgctgtccaggaaaatcttaggcagctcagagaacttgatggacttatagaagaacagggaaagaatcaggctgtacaccactgccaccacgcttccctccgttgcggtaaaaatgccgctgatgattcctccgataacaatgacaatcatcagcagacagggaatggcctggaaaaatacctttaccttttcactgttcgagtatttctttgtgctgcggtatccctttttcttggcgaaataaaagataaccgccatacaggcaaggccccagaggatgcccggaatgtatcccgccatgaacagggctgccaccgaggttccgccgctgaccagggagtaggtaatcattacattgcttggaggaatcagaaggccggtaggcgccgtggcaatattagccgccgcagagaaatccctgtcatacccttcctcttcctcaatgggtccgataatggatcccatggcggaggcagccgctgtaccggaaccggatatggcgccgaacagcatgtttgccactgcattggtatgggccagcgcacccggaatgcttcccgtaaaaagctttgcaaagttaatgagacggacggcaataccgcccttattcataatatttcccgccagaatgaaaaatggaatggcaaggaggctgaatacggatatgccggaaaaaattctctgtgcgccggtaagcacggcagctcccgtattgagcaccggaagaatggcacagatggatgacactgccaaggcaaccgcaatgggaacccccgctaagagcatcacaactaaaagcaccaaaataatcagtccgcagactactgctatattcatactcccgcatcctcctttttgctgaaatccgtgtgcagcatgtctgccgcgttcatcagactgaacatcatgataatgatgcctgtcacaggcacaaccacatagatatatcccatgggcaccctgagggatgcggtggtctggatcatggtcagctttgtgatggagatgccgccgtacaccatgaccacaccggcaaaggcaaaggtcagcaggtcgatggttacttccaggtatttcttgacggaaccgctaatcttgtctgccagaaatcccatcctcatatggtcccttttgccgaacacataagcggaagccagcagggccatccatgtgaagctgtaggttaaaagctcctcggaaacagtacttggcttattgaagaagtagcgggtaacaatctgataggttccgattatggtcatcagcataaacaggcagatgatgaaaattcccagcatctgcatgattcttgctctcactttatgcattgtctccatcctgctttcctcccttcgctttttcatttatttcctggatatgattgtacaggtccacaatcttaggattatcgtttaacatggtctcgtgaagaggcagcaccttctgtttgaaggcatccacgtccacatcaataaattccacgcccattttattctgtgcaatgtccttggctgcctcaatgctcttatcccactccttgagctccacctctgtggacagggctgccgcgtccttgaatacctggtattcctcagggcttaaaccgtttaagaatttcaggttggcgaccagcatatccggcaccatctggtgcttattataggcataatacttggcaacctcgccgtgcttgttgttggtaagcgccagctcattgttctccgcaccgtcgataacgccctgctggatggccgtatatacctcaccgaatcccatgggggctgccgctgctccaaaggcattgaccatggccacgctggccgggctctgctgaacccttatcttctttccctttaagtcatccggggtatggataggagtcttggcataaaaattcctgacgcccgcattgtaccaggtaactaccctgaatccggcttcatccgtggactcataaaccttttccatataatccgtatcctgcataacggacttgtacacatcctctgagtcaaaaagatagggcatactgaaaatctcgtatacgcctgcaaacgtctcaagattggcagttccggccacaacaaagtcaatggcccctgtctgggtcagctcaatggctttctgggcagaacccaggatttcattggggaatatctgaacctcgtacttgtcccccagccgttcctccacatattccttaaaagccagaagccctatatgctccggatgtgtctctgactgggcatgggatacacggataatccgttttccggaagtcactgagccacagcctgtaagacctgctgccacagcagccgcaagggcggctgcagccactctctttatgaattttctcacttttttcattcctttccctttacacggcaaattcttttgtttcaatacatcccagaaacctgcgttcctgtttattctggactgaaatactgtttcccataccgcaaaacggcggccttttgctgcccgctgcccagctctgtaagagtcccggcccttttctccacaacaaaagccccttggctatcaaccagaaaacgttaagattttttggcgccttcttaacactttcttaattatatagccaggggcttttattttgtaccgtaaaagtttgtcatacaggaagaaaattttgtcctcccccatttttttctagctaccttcgcacaaatgcacaaaaacctttctttatttttgtgcagtctcactatccctatactcggatggtatcattcccgtgatgcgcttgaacacttttgcaaaataattggaatcataataccctacctgcatactcacatccttgacgctgatactcctgtccctcagcagcttcttggcctcgttgaccctgaaaccggtgaggtaggacgtaaaattctggtcaaagcactgtttgaacagcttgcagaaataagcgtctgaataattcatcatcctggccgcatcctgcatggatatttccttcatataattattccttatatattcccgtatggtttccgccacctgggccagacgcccgtccccgtcatctctggacatgtcctgcgcaggttcccccgcgcggacgtccgggccagtgatatatgggccggggctatccgggccggggctatccgggcctgaggcgtcctgaccggccagccgtttatcggtcagccgcatggcctcctccatgacagccaccagctcttcctcctcgcacggcttcagcagataatccagggcccggatgacaatggccctcttggcataggaaaactcatcataggctgtcaggaaaatgataatacagtcctcatccaggctgcggatgtgttccgccgcctccactccgttcatctccggcatggatatatccatgaccacgatctggcttttttctctcctgaatgtctccagggcctctgccccgttcactgcctcgctgatatccaggctgccgccaaaatgcctcttaaggcgcttggccagcgccatccgttcaatctgctcgtcatccgccagcaatacacgatacatatgcctcatcctttcgtcctgtcatcagggtgtaaaggccatctgcacgaccgtcccccgtccctcactgctgtatatgaaaatctcgccgtcctggtacattccatggaccctgcggtaaatattgcctacacccacgccagtggccttctcttcaccccttgccagggcgcggcgtatttcctccagccgttcccgggccattccccgccctgtatcagccaccgatatccagatccgccttccctccatccaggaacggacatgtatccttcccccctgccctttgggggaaataccgtggatgatggcattttccaccaggggctgcagggcaaaggagggcaccagcacctccagggtatcctggttacagtcagtgtcatagcgtattctctgtccgaaccgcatctgctgtaaatacatgtagtcctgcaccaccttaagctcccgctccaggggcatcacggagtccgtggatttcaggttatagcggaacagccggctcagggcatgaatcatcttctctgtggtggccgcgtcctctatctgggccgtgctggcaatcatattcagggtattaaacagaaaatggggatttatctggtttttcagcatctgaagccgcacctcgtccagctgcttctccatcttgtgcttttccgtcagggcttcaatataccccctggtgctggctttcatggtgcaaaaagccctgaccaggctggcaatctcatcaccgccctccgcatgggtgtccgggcctgtgaaatcattttcccctatccgtctggagtcctccgccagctccaccatggggcggacaatgtttctctgtaccgaccggttcagccatcttaccatcaaaagggctgccgcgccccacaggatgctgaccgccggcacaataatgaacagcggccgctgcatctcataccgctcattgcccgattccacggtcatctgttccagacggcccgcatgggttgccagatatccctggacccggtaaatggtatagaggcggtccaggtaatccggcgccccttcctccatctccagaaacgcatccctggcagcggcgtaattctcatacatatttaaaatggaccaggtgaccccataacggtccgctccgatttcctcatagtcaaagggcagggacttaagtgccgatcgggtcctggcacaggacatctcatatttctccctgttttcaggcgtcctgtcccctgcgtaatactggaaggaactgctctcggcgtccatggccgaccagaaggccaggctccgcgaattgcccatgagcaaatccccgaatcccttcattccatagccggcaaccagcatcaccgctgttatggacaggatgaccacggcagccgtggaaatggtaatccatctgaccttccgctccagggagcaggacatccaaataccatgcagttttcttccttgccttccttccatccggtctacctccatcgttcatagcttattctataatagattttaccattttggaagagacaaaccaaaaacatggcggaactttgtatttttccacagcaaaaaacgcctgcggccagtaaggcaatctgccatttactgacacaggcgtttttctgcggccgccggtcataagccgcggaccatcacagcagctggtccttttcggaaggcacatacactgcaatatcctcaatatcgcagtccagtatcctgcaaagatcgttcacagtcttcatggatatgtccatgttgtgtttcagcctgtgaagggtactgtccgacacgcggtgcttctttgtaagtgtgtaccaattttcctcagattgctccagtgtcttccagaatggtgaataatctatcatctttatctcctgtatacgctcaagccgccgaagggctggtttcttagatagattaagcataagttagatttcacatcttgaatatcttcgtaattgcgaatatactatacatatgtaaatgctgttatttacataactgaaaggcagggcaaaacaaatggattatttcacaaaagaaggcatggaaaagcttctggaggatgaagaggtagtccgccgtttgacggaattcatggccatggatggtgcggcctatttcgaggaggtgcgctcccatctgtcccctgaggagctggaagaatatctggatgagaatccggatgagagaatctatctgaaaaagtaggtatccatccggtatatccatcacgtaaaagagcggcctgtcaaatgacaaaccgcccttcttcatcttcttcctcaaagtaatccttatagtccacctcaatggaacggcgcatgcgcttcatactgtaatagaggtgttccttcaaggcttcctccagccctttttcatttttatccacaatcatgctgaataaatcctcatgttcaccgataatgcgcatgaaatcagtttccgtgatgaagtccagcatcctgaacctggtatagtggagctgctgtgcctggagcatctcccacagcttctgacgcctgacggccgcaaaccagatggagtgcatctgagcgtccatacggtaaaactgctccggctcaaatcccggttccctgataacagccctctgctgcgcaatgctgtggcggatgtcctcaataaccatgggggtctggacttccaggaaatccctgagcaccatggtctccacggccacgcgcatatatatcatctgtttgatgttatccaggctcagaagggtcacataggtgccgcggtagggaatggtttcagcaaacccctgctcctgcaaaagccggagtgcgtcacgcaccggcgtcctggacaccccaaagcgctcgcatatatcattctcactaatcatctggcctggcttaagccttaaatccagaatttcctgcttcagtgtctcatatacaagctctccccggttcttgaagttcatctctcccatggctggacccccttatcaatacccgcatacagcacaggcgtaaaatacgttcttcttatcaaacagtccggccgcatcaaaagctgccggactgtcaactggtctatattataaatgattcccccggaaaattcaagccggattatttaggctgcttgccgatgtaagccaggattcctccgtccacatacagcaccagtccattgacgaaattggatgcgtcggaagccaggaatacggcaggtccgcccaggtcctcggcctcgccccagcgccctgccggagtcttgctcacaataaactggtcaaatgggtgcctggatccgtcaggctgaatctcacgcagcggagcggtctgaggggtagcaatgtagccgggcccgatgccgttgcactggatgttgtactcgccgtactcggaagcaatgtttttggtcagcatcttaagtccgcccttggctgcggcatatgcggatacggtctcacggccaagctcgctcatcatagagcagatgttaatgatctttccgtggcccttcttaatcatgctgggaatgactgccttggacacgatgaatggcgcgttcagatccacgtcaatgacctgtctgaactcggcagccgtcatatcgcacatgggaatcctcttgatgatgccggcattgttcaccagaatgtctaccacgcctacttccttctcaatctttccgaccatctcattgacagcgtcctcattggtcacgtcgcatacatagccgtgtgcttcaattccctcttccttgtaagctgccagtcccttgtcaaccagctcctgcttgatatcattgaacacgatggtggcgcccgcgcccgccatggccttggcgatggcaaagccgattccgtaggacgcgcctgtaatcagggctaccttgccctccagtgaaaagttatttaaataatctgccatttctttttcctccttgttttgcttatttcatctggttgggcatcatggtgtccatgtcgtcaaactccatgttctctccgcccatggcccagataaatgtataattggacgtgcccgcgccgctgtgtatgctccaggaaggactgatgacagcttcctcattcttcatcacaatatgtctggtctcagtgggatctcccatcatgtggaataccacgttatcaccgggcacctcaaagtacatataaacctccatgcggcgctcatgggtgtgggccggcatggtattccatacgcttccgtcctccagcacagtcatgcccatggacagctggcaggttttaagtacatccggatggataaactggttgataacgcgcttattagctgtctcagatgctccgcagggcctcttggctgcctttgcaatgggaatgtaggtggtggtgtaggaagtatgagccggcgcgcttaccatgtagaacttagccggtgcagatgcgtcgtcactggaaaaatatacttcctttgttcccttcgtgatgtacaggcaatccttatatcccatctggaactcctgtccgtcagccacaatcctgccgctgccgccgatattgaaaatgccaatctcacggcgctccaggaaatagtgcgtgccgaaattcttccagcagtcaattcccttatctatggaaacagtctctgtggtaggcatacatcccaatgtcaccatgcggtccacatgtgaatacacagccactacctcattggccgcatacaggttctgaatcaggaactcatccctcagctcctgggtggtgtaacgctttacatccctctgatttgcagaatagcgaatatccattatcttgcttcctcctttaaacttgactttctttcattttagtttgtatttgttctttactacttgtatacatttttttaaatctgtatacagattaacacagtcgtatatttttttcaatgggcatattctacaaaattgcagtgattttctatgcatgttcacaacagtaaggcttgcgttgtgtgtctgtttattatatacttgaccgtgtttgaccatgaaacattacagcgaggagaatgattatgaaaaaaaacatcctggtgggccagtccggcggccccacagccgtcattaacgccagcttatatggagtcattgcagagggcatggcccggccggaagaggtagaccatgtatacggcatggtaaacggtatcgaaggctttctttcaggccacgtcacggacctgtctcttcttacccgtgaggacctcagcctgcttaagcagactccggccgcttatcttggctcctgccggttcaagctgcctgaaaacctggatgcgccggtttacagccttttatttgaaaaattcacagccatgaacataggcgcatgtttctatatcggcggaaatgattccatggacacggttgacaagctctcccgatacgcccggatccgccgcgaaaccatctccttcataggagtgccaaagaccatagacaacgacctgcctgttacagaccatacccccggatacggaagcgccgccaagtatgtggcctctacggtccgtgaaatttccctggacgcctccgtgtaccagcagccggctgtcaccatcgtggagctgatggggcgccatgcaggctgggtgacggctgcaagcgccctggccagaaaatatcccggcgacaatccccttctcatctatatgccggaagtgccgttctccatggaacagttttttaaggacgtggagcaggccctgtcccgccagcccaatgtggtaatctgcgtatccgaaggcatacgcgacaaaaaaggccgttttatctgcgaatacaccaacgatgcccagattgacaccttcggccacaagatgctcaccggctgcgccaagatactggaaagctacgtccgcaaccgtttccgcgtaaaggtccgctctgtggagctgaacgtaaaccagcgctgcagcagccttttggcctctgccgccgatgtggaggaagcagagtgctccggcagaagggcagcagaaaaggccctgcagggagaaaccggcaaaatggttacctgttcccgcctgtcagggcccggatatgaacttgagtatggacttacagaggtaggcaatgtatgcaaccgcgaaaaatcctttcccgtggaatggatcacggcggaaggctccgacatcggaccggaattcctggactatgcccttcccctgattcaggggcagccggaccacatcatggagaacggactgccaaaatatctctacaggaagtaaccgcctcagccgtcacaccccggaatatgccgaaaacccgccgtccaccggaagtatgattcctgtgatgaaaccggcagcctcattgttgagcaggaacatgagggccccgcccagctcctcaggcttaccgaaccgccccatgggagtagcggccagcaccttggctgtcctggccgccggttttccgtcctcatcatagagaagcccctcattctgtctggtcacaaagaagcccggagcaatggcgttgacccggattccggcttttgcaaaatgcacggccagccactgggtaaaattgctgagagcagccacagccccgctgtatacaggtattctggtcaggggcctggctgcgctggcagaggagatgttgatgatattgcatccctcccgtcccaccatatccttggcaaagacctggcaggtcagaaaccctcctaaaaaattcagatccagcacgccctgtacgcccttatactccatatcaaagaacgtagccacatcggcttcgatatcccccatctcaaaatattccttagacgtattggccctggcctgattgcctcccgcgccgttgatcaggatgtcgcagggtcccaaccgggccagcaccctggcatgaacgctctccagcatttccttatccatcacatccactccgtaggcagcagccgtaccccccgcctcccgtatgtccctggctgtctcctcagccgcctccaaattaatatccagaagggcaaccgccgcgccggcccgggccagcgtcctggcaaacatgccgcagaggattccccccgcgccggtcaccaccgccatctttcccgtcaaatccgtccccaataccacctttttcttcctcctctcattctcttcccattcatcctcgccggtgatggacaaaaagggcctgagaaatttcttcccggccctttcctgattcattttgtgttttgtctgattttatgctgtacggacctgcggccggggcattatctgctcattttctccacagcctcaaacagaccattgaggtaggtagcgcctaaagctctgtcatacaggccgtatccggctcttcctgtctctccccagatcatacgcccgtggtcaggtcttacatagccgtcaaagccattctccaccagggcctttacgatgccgaacatatccagggaaccgcagcaggacagatgagctctttcctcaaagccattgtccagcacagccacatttctcagatgggcgaagtggattcttcccatggcggcgtacttgccggccagtcttaccacgtcgttcttggcggagcagcccagggaacctgtgcacagtgtgattccgttgtgcctgtcatccaccagctttaagaacttatccaggttctcctcgcaggtaatgattcttggaaggccgaagatgctccagcatgggtcgtcctcatgaattgccatattcacgtcgcactcagccgcaaccggaataatgcgctccagaaaatattttaagttatcccacagattctcctctgtcaggttgtggtattcctccactacagccttaaggccgtccttggtatagctggaatcccatcccggaagtgtcaggtcgctgtcgctgttaagcggattcaccgcatccacctgctcctgatagtataccagggaagtggagccgtcagccagctcatggtctaactgggtcctggtccagtcaaatacaggcatgaaattgtagcagatacattttacgcctgcctccgcaacacggcggatgttctcacagtagttttcgatgtacttgtccctggaagccttccccagctttatatcctcatggacaggaatgctctcaatgacgtcaaagcccaggcccgcatcctctacctgcttcttaagctttgcaatgctctccctgctccacacttcgcctacaggaacatcgtatacagccgtaacgatggactgcatgcccggaatctggcggatgttttccagtgttaccttgtcgtcttccccgtaccatctgaatgataatttcatgtgtaaactcctcctaataagtgttgttttacgttccctaacctatggttttattataacagaaacccattttccgtccatagtgatacttgccgtccatattgcaaatgttgttgtttcatgctaatatggggataaaagcatgacaaaccatgtttcccgagaggagggactcccgtgaaaaaacagctgtccatggactttaacacacggcaatacatgcagtccggagactttgaactcttctattataatgataccgcgcttaaatccgtcgatgcccatgaacatgactactgcgagttctattttttcctggaaggcgatgtggaataccacatcggtgataaaagctatcagctggaatacggggactgtctgctgattccccctgataccccccattatccccggttccattcctatgataaaccctaccgcaggtttgtattctggctgaatcaggattaccataagaagctgcggcagaccgacgaagaactgacatactgctttgactatgcccagagccaccagacctaccggttccacacagacaccattaccacccaggagattcagggaaagctgaccgacctgatggaggagcttgcgggagggcgctccttccaccggcttgtctcagagctcatggcggtctccttcctggtgtacgtgaaccgccttctctatgacagcctgcaccaaaaatcagctgtctatgaaaatgtcctgtacctgaacatctgtgactacatcaaccggcatctggaggaggatctgagcctggacagcctgtcgtcctttttctatgtgagcaaataccatatttcccacatattcaaggacaacatgggcattccgctccaccagtacatcctgaaaaagcggcttcacgccagcaagaacgccatattgtccgaccaccccatcagccatgtgtatctccagtacggcttcaaggactacaccagctttttcagggcattcaaaaaggagtacggtgtctcccccaaggagtaccgggagcagcaccgcctgcctgaacagcaggattacaccatataggggatttaactgacatgaatacacctgatatcctttcctttgacacgtacagaaactgcagcctctgccccaggatgtgcaaagccgaccgcggcctcgccacaggcttttgcggctgcggcgacgtccttacggctgccagagccgccctccaccactgggaggagccctgcatcagcggagcatcggcctccggcggaagcggcactgtattcttctccggctgtaccctgggctgctgcttctgccagaatcaccaaatcagcagcggacatttcggccgggagatgacagcaaaggagctgggccaggcattcctccgtctccaggaccagggggcatataacataaacctggtgacgcccacccagtacctgcctcatattatctccgccctggaccaggtacgctttaagctgaccatacccgtagtctataactgcggcggctatgagcgagtggagacggtaaaggcattaaaggattatgtggacatatggctgcctgacttcaagtactatgataaccgtctggcctggagatattcccgggcaaaggactattttgagactgccgccgccgccatccggcagatgattgaccagaccggcgccccggtttaccagtccgcgtctcccgggctgctggcaaagggcgtcatcatccgtcacatggtcctgccgggacaacgccatgactccattgccctgttggaatggataagcggcagtctgccccgcggccgctatatgattagccttatgagccagtacactccctacatcagaaaccgggaattcccggaactaaaccgccgtatcacatcatacgaatacggcaaggtggtggatgctgccatccgtctgggactcacacagggcttcatgcaggaaaaaagcagtgccagggaagaatacactcctccctttgatttggagggactttaaggtatgagggagggaaagcgggtttcaggacaaaaaaagcgcctgcctcatctggctgcgccattccgtcttgctctccccaaaactccccatagcctttcatgaatccggataaaaacatgaagacggatatcgaatctttgactaaccacgttcgcagattacgatatccgtcttctaactatttcgtccattggactaaacctctcttttccaaaacaattcttttaattatttctggcttttctatattaagttgttacaccattctacgttctgttacttcgctcctacttctgcatttcttcacttatgtctgattcatttcttttattgctttttctttactatccggtatcatccttcgttctaataatactttctcgtcataccattaaaccgaatttaatttttctgatactcttgagatagtgttacaaattcaatcattcacttgtttataaatgcttcactcaacagtctgtatctttaattcatatctttaaataaccgcaattgctcttaaaacattcaatctatataacttgtatttcgtttattaaattatctgtctgtgaacttacccattcacatatatctttaactcatgaaaacctgctacttcttgaattttttaccaaccgattggattcttgtttctttaaatcaacttcttaaaattacttatctgtttgagcgtttcactttagcagattggtttttcctggtctcatttataattaaatttctttaagttataaatgaaacaaaatttaagtctttggcggtccgtacctcctttgcttggattttattacttgtgaactgattgtctacagttccttgaaatcttttgttctctgttcttttgttgtcttcattatagtaaatgcccccgaatttgtcaatacttttttgattattttaatatttttttagtttattaatacttgaatccactttattacaattgtttccattttaacgcacaccttaaccttttatttgtgttaattgtttaaatattctgatttttttctaaaaaaagatacctattcccaccggatacaggtatcttttttcctgtttttccattcatttggattctttattcttccggcaccatcttccccacatcctggggaatccgggtcaggtcccgctccacaatcagatataccactgcatccggagggttctcctccagaagcgaccggtcaaaggcctgccagtgataaaagtccacattggcaaaatacctgggaaggaaatccatgagggctgtcccaaaggaatcccgtattacggcaatccggcgcttatccggcgccccgggtgtacttgtatggacaatattcttatcaccgttcacatcctgcaccgtggcctcaaggtcttcgtgatacccgcttacaagggcaatctggtcatcgcagtatttctcaggcaggtggaacagatttgccaggtccccgggggctcctttgatataatccacctgcacatcctctatgggcacaggcgtccctcccaatgcctctatgagcatctgccctgccgcatatcctcccgcgctgttccagtgcgtatccgtcttataataccacacataatcccggttcgtgttaaagtactccctggggtccagaaccgccacatccgagtgctcccgtatgtaatcctccagctgcccgggccggtttccatcccagatccgcttatatgcatccggcatatattccctgtagattccctccttgttgggagcaatcatcatgaggaagggtatgccctggctctcataatatccggccgcctttatgatctggccgccaatccaggcagcgtcgtccggataaaagggctgggttcccagggcgtcatacaggctcatgccccctgcgaaaaagtaccagccatcctttcccacaatcacgtcctgggaatccgcatagccgaacagctttaagttaatcatggaattcatgctcagaaacaggtttctgaatgccgcatggtcattgatataactgttgaccgcagccggatacgcctcgtatgtatccggtgaaaacacgggaaactctgccagattcctgttttccccggtgcctgtctggctgcttcccttcacaaagggaaacagcagatttggtatcagaagcagggcccagaaccccgcaatcataatctttttcatcataggtactgctcactttccatatggactaaaatctgaaataaataaaagcctgataggtgctgctgaccatgagaagtgtccccagcagtaaaagcgctgccatcacagccacatccgctgcggtgatgttctcctcgtcgaacagacgcgccttgagacggggcatcagctgctggatgggcccgcagaataccactgccagcaccagcagaaacagtatgcggttatccgcgaaaatccgcggattccacagtcccctgccgggaatcagcattgcctttaacagtattttcccattgtgcagggtatccacccgaaacagcagccagcccactgccactgcacccagggtatacagatgattcaggaatttcagaggatttttttccagaatccttccaagccacaaccgttccgccacaataagaatgccgtaatacgcgccccagcatatgaagttcatgctggccccgtgccacagtcccgttgccaggaataccaggaaaagattcacgcaggtacgcgccagtcccttcctgtttcctcccaggggaatgtacagatactgtctgaaccaggtggaaagggagatatgccagcgcctccagaactcgctgacagaagccgacagatacggataattgaagttctccttgtaggtaaagccgaacatcctgcccaggccgatggccatgtcggaataaccggagaaatcatagtaaatctgaaagctgtacagaatcacagccagccataccgtagccgtgcccagctgttccaagggcaggtcaaacatacggtccaccacctggccgaacatattggcaaataccattttcttcaccagtccgtacacaaaacgcttgatgccgtaggcatgcatggacaggctctcctgccggtcccctatctgcggttccagctcatgatacttgacaatgggaccggaaagtatctggggaaacaaagagatatacagcgccagacgaaacacatttctctgggcgggattctctccccggaaggtatccgccaggtaggagatggactggaaggtgtaaaatgatatgcctatgggcagcgcgatatcccttggcgtaaagccctggcgccccagaagggacatggccagttccaggaagaagttgaaatatttaaaataccccaaaagccccaaatcagccaggatgctcaggacaaataccgccttcttaagacctctcctttccccgcagccatccagtgccaggccaaacccatagttgagcaggatggacagaatcaccaggaccacataccgcggctcgccccagctgtaaaacaccaggctggctatgagcagaaccccattcttaagcttcctccccggcgatatatagtatatcagagccagggccggaaggaaaaaccatacaaacgtaagtgaactaaacagcatatttaggaaaattccctttctatcaatgtttatcaatcatgtatcacagaagtgcaggctacatggaggcagcgtcctgcctcgggagcttgcgccgtatcttatggaatgtcaccatatgggcaagggctgttatggcccaggagacaggataggacaggtacagcacgtccagggaacggtacgccgcaaatacagtgaatacccagagcaccctgaatccgcatgccccagtgagggatacaaacatggggatgagggaataccccagccctctcaggcttcccaccatgcagtccatgattccgcacagaaaataggttccgcagatgatctccagcctcagcatcccgtagtgcagaacctcaggatctgaggaatagatatgcaaaagcccgtctcccgcggccacggccgtgaatcccaggatcacgcccacagccgtcaccactcccaggcatatgtacattattttattaatcctgctgtacttcctgccgcccagattctggctggtaaagcttaagttggtctggtacaccgcgttcatagccgtatagacaaaaccctcgatgttggaggaggctgtgttcccggccatggcaatggagccgaaggagttaaccgaggattgaatcagtacattggaaatggaaaatatggctccctgcatgcctgcgggaagtccgatttttacgattcgtttcagcttcctggtgtgaatccgaagctgcttcaaatccagcttcagggctcccggagcccccatcaggctcttcaggaccagaaaggcggagatgtgctctgatatgaccgtggcccaggccacgccgtccacccccattcccagcaccaccacaaagaacagattcaggcacacattcaccacgccggatgcaaagaggaaatacaggggccttctggtatccccgatggccctcaggatggccgcgccgaaattgtagaccataagtaccggcatgcccaggaagtatatcctcatatagaggaccgactggcccagaacgtcctcaggggttcccataaggcgcagcagcgggtttgccagaaggattcccagcaccaccagaataaggccgctcacaatgctggtggtcaccgccgtgtggacggtctcactgacatccctgtcattctgggccccgtaataccgggccaccagcacattgacaccaactgagagtcccacgaatacattaattaataggttgatgagcgaagatgtggagcccaccgccgccagagccccgctgccggcaaaacggcccaccacgatgatgtccgctgcattaaacagcagctgcaatatgcccgacagcatcaaaggaatggaaaataaaaggattttgcccagaagcgggccgcttgtcatgtcaatctcataagactttttcatcttctgttaactccctgtgtcattctttctccatgccaaatccatggaatacgttcttatcagttatatcacagggctgtgctttttacaatgggttaaaaggccatgaaagcccgcgaatattcttgacatttccagtcccgtcctttaaaatggagcaagtgataagggagtaattggcatgccccgccctgccgggcatgtaataaggtcaacatactgatagtttctatctggctttatttgaaacaatgagacttatctacagcattccaaggctgtaggtgggtctttttttataccacaatccatatattaaaacatcaccagggaggaatcattatgtcattagctgaactgtttgtcatcgccgtggggctgtccatggacgcgtttgcggtatctgtctgtaagggcctggccatgcctaaaatgaactggaagggcgcccttttggtagggctgtactttggcggtttccaggccgccatgccccttttcggatatttcctgggctccagcttcagcctggccatacgggcttacgaccactgggtggccttcatcctgctgtctgttatcggcgcaaacatggtaaaagaatccttcagcaaggaagatgaatgtcccgacgcggacctggatattaaaaacatggtgcttctggccattgccaccagcattgatgccctggcagtgggcgtgacctttgccttcctgaatgttgacattctccccgctgtattctttatcggaagcgtaaccttccttctgtccgtggcaggcgtaaaggccggcaacgcatttggatgccgctataaatccagagccgagctggcaggcggtgccatcctcatccttatgggattcaagatactgctggaacacctgggaattttgttccggtaaggcataaataagaatacggaaatcccctctcatcccctcataaagacagcgggacagcgctctctgaacacgctgccccaccgtcttttattttatcattttcctgtctgaaatcctgcttccgggctcagaaacgtaaatcttcccggtctcagattctgacgccgctgctgtccagctggtaaccgtcaatgatgcggtttgtctgcatcactccgttttcagggtccatataataccactgtcccttgtattccagccagccggtcttcatataaccgttcgttccgaaaaaataccacttgtcattaatcatggcccaggatgtaaggtattcatcctgatacaggtacctccagccgcccatgtccttgttccacttgcccagcaggatgttccggtagttgcccatgtcctcctcgggaaggagcatgtaatacctgctttcctttttatcctgatagcagaactctacaatataacattgatccaggtagttgtaatcccccgcaacggaccgttctttttcaacggtctccggccggattacagggtaatgggttccttcctttaagccgtacaccgtacattccagatacttctgggtctcgcccctataggtgacaagataataattcagtgtcacttcattcaggtccacatcacttttgtcctttgtaactgtgaacgtatcgtattccgataccctgtacccaagcagataggacgaatatccatcgtaaatcgtggtccttctgctgttaacatccaaatgcagggtaacaggcacctcagccttaaacgaagccgctgcctctgagacaaacgcagccgacacactgagcactgccgccaggaccagcgcgcctaaccgcttaacagacatataccgtctcatccagtaccctcctctcaaacctttggactactcatgatgacatccagggtgaattcccggcgcatccgacaaccattattttaatacaatcttcttgaaattcttcttgccgcgcttaacgatcatgccatctccaaactgttccctggagtatacggccttgatatcctttacaggatttccgtccacggacacaccgccctgttccacgttccttctggcctcagaacgggacgctgccaggccggacttgttaaggatgcttaaaatatcaatggttccctctgagaagtcctcttctgtcagttcaaaagcaggcatattttcggtgcttgcccctgctgcaaacagagccctggcgccttcctgcgcctttgatgcctcttcctcgccgtgcaccagctttgtaagctcgaatgccagtatctcctttgcctggtttaactggctgccttcccacttatccatctcgtcaatctgctccagaggaaggaaggtaagcatgcgcaggcacttaagcacatccgaatcccctacatttctccagtactggtagaaatcaaagggggatgtcttctcaggatccagccacacggcgccggactgtgtcttgcccatcttcttgccctcggagttaaggagcagggtaatggtcattgcatgggcatccttgcccagcttacggcggatcagttccgttccgcccagcatgttgctccactggtcgtcaccgccaaactgcatgttgcagccgtaccgtttaaacagctcatagaagtcatagctctgcataatcatgtagttgaattccaggaagcttaagcccttctccatcctctgcttgtagcactctgcccgcagcatgttgttaacggaaaaatgaggtcccacttccctgaggaatccaatatagttaaggcccatgagccactccgcattgttgaccatcatggcctttccctctgagaaatcaatgaaacggctcatctgctttttgaagcagtcacagttatgccggatgatttcaggggtcatcatggtgcgcatatcagaacgtccggatgggtcgccaatcatacccgtgcctccgccaatcagggcaataggcttgttgcctgccatctgaaggcgcttcatcagacagagcgccatgaagtggcctacatggaggctgtcagctgtgggatcgaagccgatatagaatacggcctttccctcgttgaccattttcttaatttcttcttcgttggtcacctgggcaataaggcccctggcaaccagttcttcgtaaatctgcatggtgattctctcctcttcttactttctttattttaccatacttctgctttcatgcaagggcttgattcttacatttttaatacagaggcagcagaggcgcagggcgtaccgcagccgcggattccccttaacgaactaaaaaaagccccgcccttatccaaaaggacgaagcccttaagccccgtgttaccacctgatgttcacagacagctcgcgctgcccgcctcttcgagtaccgcgtcaggctctaaagccaacgcccatatactctagcacgataacggatgcaggacccgtcgcagcctactaaggctgttgtctgcaacagcgccgttgggtgcgaagctcagggatgtattcatggcctgcattccacgcgcctctcatcatccggctgctttctgtctgttcctgcaggctactacttgttcccgtcatagccaattcatgaaattatgaccattatagacagactctcccggtttgtcaagagtcaatcccggaaacctatacaatcccgggaatcggacttttaggaatcttttaggaatccgcggagaaatcggctccttttgccgtttcccctcccgggcggtgtgcaaaggtaagcacaaacacggctcccagtatcagggcaaatcccagaaaatcaggcagcgtaaaccgggttcccagccagaacacggatatgaccaccgcggataccggctccacgcttcccatgatgcttccctttaagggtccaatcatgctgacgccctgaaggtacaggccaaatgcaatggcagtgcccaccaccaccacgcctgccagggctcccactatgcccgcgtcccatgccaccccatagttccacggccgcaccacagctcccatggcaatcccgccaaaaaacatgccgaatcccagcacctggtatatatcatacttaagtatcagtcctcccggtatgatggtataaatcatggagctcacagctgccaatagaccccagaacagggcctcccctgtgatgtggaaggagtgaatgtccccgtgggtgccaataacaaaggtgccaaacagagacagaccaatggctgccagctcaagcccctttggaaggcgcagctcccgcatgcacaccactgccaaaatcaggatgggcgacaggtactggagcacggttgccgttcccgcgttggatgcctggattgccataaaataggtgaactggcagaaggtaatgccgaaaatagcaaatgccagcaaatggatggtatccctcttcttccggaacaccctcaggttatccctgccgtgaagcttaaacccggccagaaccagtataatacccgcaaaaaacagcctcacagccaccagccacggggcctcgattcccttctgttcaaataaatactgcccgcagcagcctgaaaatccccagcaggttccgcctgccagggccattatggttcctgctgtctgtctcttatcattcttcatctcacacgttaatctcccgcaccagtcatgtctctatttatacttggaaaatgccttattgtcaatattttcgtgggattcactatttacgaatccggttttctatactataatgaagcattgaaatgtatcttacaccgcagtccggtgtttacataatgggaggacgaagaaatgggattcacattcatcaataagctgcctacgccggcagaaatccgggaacaattcccgctggcccctgagctggcggaaatcaaacatgcacgggacgaggaaataaaaaaggtatttaccggtgagagcggcaagtttgttgtcatcatcggcccctgctcagctgacaacgaggaatctgtatgtgattacgccggacgccttgtgaaagtccaggaaaagacaaaggacaagctaatcatcattccccgggtctacaccaacaagcccagaaccaccggcgagggatatatgggaatgattcatcagcccgatcctgagaaacggcctgatatgtccgagggaatactggccatccgccatatgcacatgagggtgctgcgggagacaggtttttccaccgcagatgaaatgctctatcctgaaaacatgaactatctctccgacatgatgtcctatgtggcggtaggcgcccgttccgtggaaaatcagttccaccggctggtggccagcggctgcgatgtgcccgtaggcatgaagaaccccaccagcggagacctgaccgttatgctgaattccgtggtggctgcacagcttccccacgacttcatcttccgcggctttgaagtacagtgccccggcaatccgctgacccacaccatcctgcgcggagccgtgaacaagaggggccagtgcacccccaactaccactacgaagacttgaagcttttatttgacctgtataacaagcggggactgcagaatccggcctgtatcgtggacacaaaccacgccaactctaacaagcagtatcaggaacaaattcgcattgccaaagaagtgctccacagccgccgtcactccggagatataaggaatctggtaaagggcctcatgattgagagctatattgagcccggcagccagaaaatcggggaacactgctacggcaaatccatcaccgatccctgtctgggatgggatgatacggagcggctgctgtacgagattgcggataatctggattagcacaataacatgattcaaacaaacaaaaacgaacagcaaaaagggctctgccatgcacaatccgtcagcatggcagagcccttttctattccgtatttctgttctggcaatcactcttttatttatgattaagcttcaggctttcgttcctagctggccagcgccgtaatcccaaaatatgccagcacaatcacgcccaggataattctgtagtatccaaagaacttaaaatcatgcttgcgcacatagctcataagaaaccggatggaataaatggagaccacaaaggcaatcagcattcccagtatggtgtagaaaatctgcggtcctgtaaatgcattccccgccaggaaatactttacgattttcaacaaactggctccaaacataaccggaattcccaggaaaaatgaaaactctgccgcggcagccctggaacagcccaagaccatggcgcccagaatggtggaaccggagcgggaggttcccggtatcaaagccagaagctgtaccatgccaatgaggaacgctgtcttggctgaaatctgtcccgccttgttaaacctgggattggtacacacgctgctgttctcaagtacaataaaaagtacgccgtacacaatcagagccgctgccaccacataggcattgaacagatgggcctccatccagtcatccagcaaaagccccagaatggctgccggaacacaggcaatgataattttaatccacagagcccaggtggcatccttctgccggctggtcttggttgggctgaagggattcagcttatgaaaatacataaccaccacggccaggatggcccctaactggatcaccaccaggaatacgtccttaaacgcatccggctggttcagacgtatgatttcatccaccagaatcatatggcccgtgctgctgatgggaagccactccgtgaatccctccacaattcccagtacaatgatctttaacacttcaactaaactcataaattctccttaccgcagacaggctccattccctgacgccctcggcatcccgcccgtgcagccatcctgctgcaagggcccctgcctgctgtacattttatgtattcttatctatccctatacctgttttatacattctcaatctgccagtcaacaggcgtaaggccgtgctctgctaaaaatgcattggtcttgctgaaaggcctgctgccgaaaaatcccctggacgctgacaagggacttgggtggggcgcctccaggattaaatgcctgggattattcagcattgccttcttagcctgggccggacgtccccataaaataaacaccatgggcctgtcctgctggttaagaatgcttatggctgcatccgtaaacttctcccacccaatgtcccggtgggaattagcctggtgggctctcaccgtgagcactgtatttaacagcatgacaccctggtcagcccattttttcaggtaaccgttattcggtatataacaccccaaatcgtcgtgaagctcctggtaaatattcaccagtgagggaggaatatccacgtccggctttaccgaaaaacacaggccatgggcctggccataattgtggtaagggtcctgccccagaatcactgccttcacgtctgccagcggtgtaaaggcaaacgcgttgaagatatcatcgggttcgggaaacacccttttggtctcatattcatgctttactgtcttatacagttctttataatagggcttcttaaactcgctgctcatgggccccagccagtcattggtaatagcggccatatcctgcttctccttttctttcacgatataaattcacattttcatattttagcataggaaaccgcaggaaacaacggatatcgacaaaataattaagaaagagggccgggagcgcagcctggtgaggatggatataggagggcaacggtatcgagatatgggacagagggcatgagacaggaggatggatgaatggaggatggggcttgctgctgtaacttgcggacggggcttgcggatgggggcttgcggatgggggctttcggcttcatacgtcagccggatcgccccatatgtctccacccatgaaaaacaggcacatgtttcactctatttaccatgctacccgttctgcttccgccgtcaaagcctccggcccccgcgttccagcccttccgctatatccttacggcaatccctctctccgacaggtactccttaaggtcccttatttccagttccttataatgaaacaaagatgcggccaggacagcgtccgcgccgccctttgtcagcgcatcatagaaatgttccttattcccggcgcctcccgaggcaatgacaggcacggatacgtgggaggctatgagagaagtcagttcgttgtcatatccgttcctggttccgtcgcagtccatgctggtgagcagtatctcacccgctcccagacggtctgcctccatggcccactccagggcatctatacccacatccacgcgcccgccgtgcttatagatgttccagccttttccatcagccctgcgcctggcatctatggctaccaccacacattggcggccgaacttgtccgccgcgtcgctgataagacgcggattgtcgatggctgaggaattaatggatatcttatccgcgccctcccggagaagcatgcggaaatcttccaccgtgcgtatgccgccgcccacagtaaacgggatgaaaacagtctccgccaccttgcgcaccatatccaccacagtgcggcggttgtctgaggatgccgtgatatccagaaataccagttcatctgcccctgccttgtcataagccgcggctatctccaccgggtcccctgcgtcccgcaggttcacaaaatttacgccttttaccacgcgtccgttgttcacgtccagacatggtatgattcttttggtaaacatatcgcctctcctatctcttgttttaattggcatggcgctgtcctggcaacattttttcagacagcgcgggacttttacagtccgataaaattcttaagaatggcaaggcccaccttcccgcttttctccgggtggaactggcatgcaaacacatttccccgttcaacagaagcgtggattatggtgctgtactctgtggaagctgccacaacggactcgtcctctgctttcaaataataggaatggacaaagtaaacataggctccgtcttcaatcccatgaaacagctttgcctccggccttatcttcagtgaattccagcccatatgcggaattttaagtccgggatgttccggtatcttaagtatctttcccggaagaatgcccagaccggcagccccatggctctcctcactgccggcaaataaaagctgcagccccaggcatatacccagaaatggagttccctggtccactgtctcgcaaatcacatccacaagatcatactgcttcagctttcccatggcatcgccaaaggatcccaccccgggcagaatgaccttgtccgctttgagtatcgttttcctgtccctggttatgacaggcgtttctcccagtgaaagcagggctttttccacactgcgcaggtttcctgcgtcataatcaataatagcaatcatacattcaacctcgttcctatgatttaatattttagcattgtaacgtgataaaggcaactttttttataatcgcttgaatatcagatgattgccaacgagacctcttggaatgtaattgaccggctgatattaacaaggcatggtagtgataaagtaattctgatattcttctcagtcctctgccaggccgcggataaaggcaacggaatctgcctggattcccgcggcccgctctcccatttctttgggcatttggtaaaacgtttcatgtatcctgtaaaacacggatttctgattgaaaaaaccaatcttctcaaatggccagcgcatgacggtaggcgtcttaaacccctctcccagttccaggataaccagtctgcggttcagagtccctgtctgccatttcttgtatgcctcccacctgggcaggtagccttcctctatataaatctctgcatcaaccgtattgcctgtcaggggagccttgcagtgagggcagatatcatccggcacctccccctcttcccatatatccttggtacaggccttggaacactgcctccaatgaatatttccgcagggagcgaccacccgcccgctgtcaaaatccgtgtcatagacagctccatccgtcacagtggtaaccacgtaataatccttgtccctgatcagactccacagggccgcgtaagcttcccgaagctcctcctgagcctggtctcccagacagcgctggcgcacatctctaccgtcgtcccttaatttccattcccctccgatgcctataagtaccttttccgcgccggacagcgcctctgacaactccttcttctgctggtccatatccactcttcactcctgtctttcgtaaggctgcccatgaacccaagtgtctctgacattccacttcgggcccggcgccgtcttatgctatcataccataaaacatggcttgcttcaacgctgcctaatcccggatggccggatgatgccttgaccgccatatgtcctcccgtcagactgctcttcccggttgcattttcgccggacctgctataaaatatagaaagcaaatacagaaaaaggagcctgccaaacggcagaccggacctggactccggcctggcagcgcaggcgaagaggtgaagcatcatcatgaaatcagcacaagacctgagaagattactggaatccattgaccggaaggggtatccggcctataaagatacgcggggttcctatgactttacggattatgtactttccatcgaccatgtacagggggacccctttgcatccccttccaaattaagtgtatttattccgcttcagagggccgcctaccccagcggatattttgacgccccccacaagcagactgccctggaagattatctggtcaggcagttctgccaggaaatcgccaagtacaattttaaagcaaaaggttccggcaaaagcggcctgattgccaccagcaatcctgggcctgagattctgagccggacagcctgcgaatgcagcactaagggtataacggcacgctttgaggcaggttttcctgccaatggcaggaccattaattccggcgaactgattaagatcctgtttgacttcctgccgcggtgtgtcaaaaccgtattctattataaaaacaggcctgcccgggaggtaaaggccgtgtcagacctggcggaagaccagcattttatccgatgtgaactggaacgcctgggactggtctcctttgtggcagacggcgccatccttcccagggaaagcggcatttccagccggcccatgaaaggcagcgtgcccttccagtcaccggattccctcagaatggaattaaaccttccccatcacggcagaatcaccggcatgggacttcaccggggcattaccctaattgtgggcggcggatatcatggcaaatccaccctgttaaaggcactggagtccggcgtctacaaccatgtggccggagatgggcgggaatatgttattactgattccactgccatgaagctgcgggcagaggacggcagaagcgttcagaatgtagacatttccctgtttatcaacgacctgcccaacaaaaaagacactcactgcttctccactgaggatgccagcggcagcacctcccaggcagccgctgtcatcgaagggattgaggccggaagccgtgtctttctgattgacgaggatacctccgccaccaacttcatggtcagggatgatctgatgcagaaaatcatcagccgggcccaggagcccattaccccattcattgagagggccagggatttgtatgaaaaatcaggcatttcaactgttatggtggcaggaagttcaggcgcttatttctatattgcagataccatcctccagatggactgctatgaaccgctggacatcacggataagaccaagaccttctgttccgcctacggcgttgagcccatcacctctgcccccggctttcttcttccgtccggggaacgcaggctgataagcaataaagtcggttcccaggctgtatcgggaaattttgctgccgcaaacaggggtaattacagaggcagggggaccctcggcggaggccgtgacgaacgcattaaggttaaggtatatggaaaagattccctgcaaatcggcaaatcccctgtggacctgcggttcgtggagcagctcattgacgctgaacagaccagcactctggcacagatgctgcgctactgtgtggaacaccagctgcttgaacggtatacggtaagggatacggtctccatgctgcttaaggagatacagaagggcgggctggccgccgtgggcgacagctcctacacagcctgcggcctctctatgccgaggatccaggagatatacgcctgcatcaaccgctaccgcaattaatccccggaaaaatcaataccttggttttattaaaaacagcgcttcctctgcctgtaatggcagcggggcgctgtttcctttccttcgctactgtttctattttcttcgtctgtttcctctaatattcctttccattcagaatctccagatagtccttcaggttcttctccaacagtgagggcgtgtccaggttatatggacattttcccttgcactggttgcagtggaggcactgttcaatcttcttcattttctcctgcgcgtccggcgtcagccaggccgcggaaggagccctgcgtatcataagggacatcctggcacagttattgatttcaatgcccacgggacatggcatacagtatccgcagcctctgcagaattctcccaggagttctttcctgtccttatcaatcagcgcccttatctcatctgtcatctcaggcggatttcccacataagacaggaattcatccagctcccgttctctctgaacaccccagattggaagcacattgtcaaactgggctaaatatgcgtaggctgcccgtgaattattgataagaccgccggataatgccttcatggcaatgaaccccatgcctgcttccctgcactgttccaccagttccaggtccttatccgtggccagataacagaatgggaactgcagcgtctcataaatgcctgaatcaattgcctccatggccactgacagcctgtggttggtgattcctatgtggcgtaccttgccctgctccttagcctccagcacggcttcatacagtcctgtgccgtctcctggctttggacagaaggaaggattatggaattgatagaggtccacatgatctgtcctcaggtttttcagggaaatctccaggtcctcccggaatttctctgctgtctttgctgctgtcttggttgcgatgaacaccttatcacgtattccctcaagcgcggctcccaacttttcctcgctgtccgtatagttcctggctgtgtcaaaaaatgtgataccgccttcatacgccttttttatcagatataccgcatcctccaccggtatcctctggataggaagggccccaaacccattcttgttcacagttatacctgttttccccaaagtgacttccgccatcttatgtacctccttcaagcctgctgttttttatcattctaccataaaacagctgccatctacaacatgaggactcaaacaagcataaaaactaagaaaaaaaaataagaacgcgtattttacaggcgttcttatctttgcatggaattaccgtgtatacaggattacgtgtctcatgcactgagagtcacgtcccctcctgccagcatttcttttaaatcatccatggtcatgtcacgttcctttaacatatcgctgaccaccttaaattcctccagctggatatgttccataagtaccttttccttttctctcatggtttccagacagctttcatactgtgctatggatgcttgtacatccgccagctctccctgcagtttttcaaccggtgactttcttactccccgtgccatatcatgcgctccttttctttttgataaaatctggtctgaatctgcttccgggtatcagatcggaggacaggtccatttattaccagtatatgtaaccaaatttcaaaatatacataagctgtttaaattcctcagtgggatcaagccagccggcccgtggcaggggcaggtaagactctgggtaagactctgcttccaactactcgtcttttggaaatatttgtggtacaatagctccatgtgccgctatgctgccggaaaggaagttactaccagccgataccagggatatgacagatgagggattcgcattatggtatcatgaccagatggattcaaaataaaaccagtaaatagcaccaggaggtcactatgtttaaagactacgaacatcacgcacagtattacgagacagaccagatgggctgtgtgcaccattccaactacatccgctggatggaggaagcaagggtaaaccttatggaacaaatgggctgcggatataaggccatggaagcatccggcatcatgagcccggttctggaggtacactgccagtacaggtccatggtacgttttgatgaccatgtgaaaatacatgtatgggtaaaggagtataacgccatacgcatgacccttgcgtatgagatgcgcgatacggccaccggtgaactcaaaaccacaggtgagagcaggcattgtttcctggatacggaaggcagacccgtatccctaaaacgttcctacccccagtgggacaccgcattccgcaatgcggtccgggcacagaatgcccggcaatgataacaaccataaacactgcggttatgtgaacggatgatccccatctgaatatatgattattacaaagacaggaaggctgactagtttatgacaaaaccaaataatatccgaatattggtaatatccattttatgtgcaatatctcttttgctgggaggatgcgcggattcatccccctctccttcacctgacaaggatttctccgtaacgatgccatccgggtccggactggctgtgcattttattgatgtgggccagggcgatagtatactggccgaatcagacggacactacatgcttattgacgcaggtgaaaatgaccaggccggcaccgtagtctcttatctaaaagcagagggagtgacaaaactggattatgtgattggcacccatcctcattccgaccatatcggcggcctggacaagattattgatacctttcccgtggacaaggtcctcctgccccctgtggaacataccaccaggacctttgaggacgtactggactccattgcctccagaggacttaaaatcaccaaacccgcgcccggagattcctatgatttgggaaacgcgtccttcaccatactttccccggtaaaagactacggcaacgacctgaacaactggtccgtgggaatccgccttacctatggcgataatagctttgtcatgtgcggtgacgcggagaaccaggctgaagaagatattgtaaacagcggcgccgtgctgaaagcagatgttctgaaggcaggtcatcacggcagcagcacctccaccagtgacgcatttctgaaaaaagtgtctccctcctgggtggtaatccagtgcgggaaaggcaactcttacggccatccccataaggaaaccatggaaaagcttaagaaggcgggctgccagatactgcgcacggatgaggaggggaccattaccgcattcagtgacggcaagacaattacatggagcaccggcagcggaacgttcagcggcagcaataatgccggcaatagctccgctctctcaagctatgttattaatacaaacacaggcaggttccaccgccccgactgtgcctctgccacccagatgaagcctgagaaccgaaaggatgtaacagcatccagggatgaactggtgcaggagggatatgaaccctgtaaacagtgcaaaccttaaaccaaacgcaatatgagacattctgtaaatactgtctcttaccccacccccacagaaaggattccctatatgaaatatatcatcgaccggctggaagagggtctggccatatgtgaaaccgaattaaggaaacgcatctccgttcccgtcagccatcttccaaagggtattaaggaaggcgacgtgttaagagaagaggaaggcaggttttccctggattctgaagaaacagataaaagacggcgtgaaatgaagaagaagcttatggatttatttgagtaaaatcaaaaaatgataaacggctgcgggcccgcgttgactgtgccaatgcggacccgcttttcctgtcatttttcctgtcatacttctgccggttcatcctgcccttacctgttatccggctatatcatcttcccgtcctggtcaaactgatattcctttccatcgattacgcaggtcccgacggccatcttcccgtctgttcccagatagtagagagaaccattttccccataccatccggtccgcatgtttccgtcaccgtcaaaacagtaccatacgccgtcaatctgcttccagcatccaatcagccgggttccgtcctcacagatatagttccactgtgccccattccggcgccagcccgaagtgccggaagcttcccctgccccggaaatttcccggattgcagcctgagcctgtgtccggtcctgtgtttgagcctgtgtctgtattttggtctgtgtctgagtcttggtccgggtactttccccgcctcctgcatagggacacactccattgggatgcaggtgtgccggataacctccgcagtggtaatgatagcttcccagcccgctggcattcttattatcccggtgacctccgctggcatctgttctgcctgaatgggcctgggcctccattacccacggggcctgtcccgtcattccggctcctccggccagaagcactccactcatgaccactgcaagccataccttcactgtccgtttcatctcattacctcccgatttcaattttaactctattttaccatgtttccgtctgtgtgtaacatcatatttcagcatctttccagaggattttctcattttcagtccgtttccggcataaaaaagtgatggaagcacttgcacgtttttcccaatgatgataccataagaaacatatgtaatgaattcaagtagtttggaggtttttaagatggaactaatcatacctaaggattacgatccccatctctccatacgggagacgcaggacgcaatcaaatacatacgcgacaccttccagaaggaaatgggcagggagatgcaccttgaacgtatctccgctcccctgttcgtggaaaagagcagcggacttaatgataacttgaacggcaccgaacgccctgtttcctttgacatgccggggcttcccggtgaaaccatggaggtggtgcactcactggcaaaatggaaacgtatggccttaaaggaatacggctttaaaccaggcgagggcctctacaccaacatgaacgccatccgcagggatgaggaactggataaccttcactcctgttatgtggaccaatgggactgggagcgtgtcattactaaggaacagcgcagcctggacaccttaaaggatacggtgcgggagatcttcaagatcatcaagcacatgcagcatgaggtgtggtataaatacccggaggctgttaaacacctgccaaaggatatctactttatcaccagccaggagctggaggacctgtatcctgataatactcctaaggaaagggaaaacctgattaccagggagcacggctgcgtgttcctgatgcagataggtgacaaactggccagcggcaagccccatgacggacgtgcgcccgactatgacgactggaagctgaacggcgatatcctgttctggtttgagcatttgcagtgcgccctggaaatctccagcatgggtatccgtgtggatgaggctgccctggaagaccagctgaagaaggcaggatgtgaagaccgccgcagcctgccctatcataaaatgcttttaaacggtgaacttccctacaccattggcggcggtatcggacagtcacgtctgtgcatgctgcttttggaccgcgcccatatcggtgaagtacaggccagtatctggcccggaaaaattcgcgatatctgcgcagagaacaagatttatctgctgtagtcattggctgggagcgtattatggaatcgaatatctcaatcttttttatcatcgaaataatcggtaccgtggcctttgcgtcatccggtgccctggtagccatcaaacagcggctggatttgttgggagtggtggtccttggcgtcaccactgccgttggcggcggaatgcttcgtgacatcatactggggatcgtaccgcccagcctgttcatgaacccggtttacgtgtacacggcctttctcacggccatggtgctctttatcctggtctggctgaaccagcagatactggaaagccggtatatctcggcctatgagaagatgatgaacctgtttgatgcggtcggactgggagcattcacagtgacaggcatcaacaccgcggggacagcaggttacggggaatatcatttcctttccatctttctgggcgtcctcacaggcgtgggcggcggtatcctacgggatatactggcaggccagtccccttatatcctgcgcaagcatgtatacgcttctgcctccattgccggggccgtgtgctatgtctgccttaacggctggctctccagggacgcctccatgatattaagcgcaattctggtggtgctcatccgccttctggcgacgaagtacaactggaaccttcccacagcataccataccagaaacaaataaatgaaaaaggcccaggcccaatcattgtacgaaccaatgtacggatgattacggcctggactcttttgtcacgcgcttgtgcggctcacctctgctgctgtaaatacttcgtaatgcttctttggaatatcttcatgctgctgtccacattcctgttttccatgagtatctttgatacttccccgtccgccaggctcatgacctgctcatactgctggaatttgggctctatgactccattttcaattacattgtaaagcaggctgctgttgatgacctgctctccctcatccatgtcctcctgtatgatggcagccgcccgggcggagccggtaacgcttttgagcacagacaccccctgggaataccggaatatatccatctgcatctcctcatttccggtcagctgtttcagaaactcccatgccagcttttcatgctttgtattgctgttgattcccatgagaagggaatcgaccctggaacggttctccccttccttgcccgcgggaaatgtgatgcagtcccactggaacttggtgtatttcttaattctgtaaggatatgtcttataggtcctgtactccgcaaaggtcagcggcatgaaagccacgttccccttgttgaaatcctcctgagtcacactctgtccctgattaaggtcgttgaggcgcttcatgtatttgatggcatccaggacatgggagtctgtaaagggcagttgctgctggtccccgtcataaaatcttcccccgctggtgtaaaccgcgtttctccagctgtaattataggtcccgaactggtccagcagtccatctccgtttacatcctttgttatcttccggcagatttcatacatgtcgtcccaggtccagtcctcccccggcacctcaatctgctctttggccagaagagacttattgacaaacaaaagaacgggaactgtttcatacggaagggcgcactggtgtccttcgtactttcccgcatccagggcagtggtgaaaaaatcattccggtcaaccccggcgtcatgctcaatgagctcgtccaggtttttcaggactcccagggacgaatacaggttgaaatccgaatcaggcaccataaacacgtccggcatctttccctctaaaagctttctggcgcaccactccgagtaatcctccttgctgattccgctgtagtaatgtatcttcaccccgggatgctcctcctcgaaccttgcgatagccttgtccatgatgacaaagctgctggcgctggccacatcccagttgcttcccgtaaacatgccgaattccaggacaatctccttctcatggtacttatatacacatccaagtaagcccacaagaaggagcacgaaagctcccgcccccagtgtccatttccatcctttcatcccaatttcatccttccttctgccaacatcttgtcatccccctgcccgcgtacttcggcacggtcaaatctcaggtgcccagccgctttcttacgttggtctggacagcccagattgccagctgggtgcggtccctcaaatccagcttgttcagtatggtgctgagataattgcgcaccgttccctctgacagcttaagggcttccgctatctccctgttgctggcccccttttccacctgggctatgattttccattctgtctttgtgagctcgtccacattcttatcacccacaagtatggtgtaatccgcctgggccatctgcgaaaacagcctcagcaccttggtggcaatatccgggttgatcatagcccatccattgtacaccgtggtgatggcattggccagttcatccatggacacaccctttaacagatatccgctggcgccatatttcagggcattgtagacgtactcgtcatcgtcaaacgtggtaagtataataattttaatctgaggataattttccttgataattttcgtgcactgcacgccgtccagctttggcatccgtatgtccatcagtatgacatcgggtttgttcttcctcacactgcggatgacctcctgcccgttggaggccacatccgtaaccattatatccggcctgctgttgagcacaatctgcaggctctggcgaatcaattcctgatcgtcggcaatcaatactttaatcataagtctccccccaccggattggtattcttgcatttacagtaaatccgtcgcttccgtcaaatgtaacaacgccgctcagcatcttaatcctctccttcatatgctttgttccgaatccgctctttatctccttacatccgattccgttgtcccttatctgcagaaggatgtccgtatcctccttctttatggtaatccagatctgactggcatggccatggcgcagggcgtttgtgattccctcctgaatcacccggtaaatggcgttttcctcgtcctcgtcaaatttcaggttctttacctggcagtcaaaatacacccttgcgccggacacagcgttcatgtccgataccatcttgctgatggcgtattccaggctgaatcgctccagggcgtccgggcgcagctggctgaccgatcgccgtatctccttaatgccgtcccttgtgaccttggaaataagctccagctggtcctttgtctgctggggcgatgtgcctatggtggccagacaggcgtctatacccgcggcgattccggtcagggtatggcccagggtatcatgaatttccctggccagacggttcctctcccgtgtctcggccatcttctccgccatcaccgaatactcctgaagctgctcattcacgtcctgaagctgctcgttaagggcgtgtatctcatccagatttccctgctgctggttgataatgttcacacagtacaccacgaacatgattacattcagggataccaggatattatagcagctgagcagatactgctgggtggatgcattgtaaaatgagatataatcctgtatggaatacaggcggtaggaaatggaaagcagttcataatcggccaggatgaagctgccgattgccactgccgccagaaaatatctggatttcccgtttttggcatagagaatgacattggaaaacaccagcagcagaattccgttgtaattaaaattcaaaagtatgataatggcaaaacaaatggcaaaatcagccacaaggctaaaaagaatcaccttgctgttgtccggaaacagccggtcccgcacaaacatgctgcctgccaaaagcgccagaaggagggcgcagatccagatgttccggtaagggtaccagacaatggcctggatgccgcttaagaactccctggccacatagctgcgccgtatattttcaattgtggcatatataaatatgctgagtcccattacggataccacattaagcgccaggatgcctaactgcagaatgcgtacccgcctgttatccatattcgtatccatcttttcactgccacccgtctatctcaaactcatggagattgtccctcgtaatcatggtgctgggcaggcttatgtacttctccaccggctccccgtccaggtaacggtacgcggtctcagccgccttcctgcctatggaccttgggctttgggcgctggtccccgtcacatagcccacgtccagaattgccttgaaatccggagagccgtcgattccgtatatcaggacgccctcctccctcttggcctgctgcagggctgccagagctcccagcgccgtggggtcattgccccccaaaatcacgtcgaagctgatgtcacggcgcagaaggtcggccatcacatgggaggacacctcaatctcgcctgccgcagcttccctgtataccacctggtaattgtcattgtccgctatggtgtccagaaagccctgttcccggttggtaatggaggtctgtatgggattgttgaggatgacgattttagcctcgtccttccgtttcatcatatccagggcgcagagctggcctgcctggtagttatccgtctcaataatggaaatcacggaatccctgtccttcaccaccgtatccacattgatgatgccgactcctgcctctcggcaggcatccagggccggctgcaccttttcccagtccacaggatttaaaaacagcatctgtatgccctcgtctatcatctcctggatctgctcgttctgcttttcctggtcctgaagggggtccctggtgagaaggatatcgccgttggcttccaccacctcttcaatcccctcattgagcacatcaaaatacggattatttctggtcatataggtggccccgaacagcctggcctcatgctggcgcccgcttccgtccgcctggccgcagccctccaacagtagcatgatgcccgctgtcaggattaacaaacctgttcctatcttcatctggttcccgcctccctgtccctgacttcatttcccggatgcctggccatatccccggcttcccggtcacgcccccggtccggtcctttcccattataccgcaaacatgcgtatctgtaatatctcatggtaactttttaaaaactttgacttcgacaaaaagcgccccactgccgtgaaacgcttttgccgtaaaccaggctttattccgcctttttgtttctcaggtaatccacaaaaacagccaggagaataacggttccctttacaacgtactgccagaaggaattgacattcagcagattcaggccgttgttcagcacgccgataatcaggccgcctatgatggttccgcctattttgccggatccgcctgccatggaggtgccgcccaccacaacggctgcaatggcgtccatctcagccccgtctcctgccgtgggctggccggaatacatacgggatgccagcaccacgcccgcaagtcctgccatgattcccgaataggtatgtaccaggaattttacctttgccgtactgatgcctgagaatctggctgcctgggaattgccgcccaccgcgtagatatggcgccccagctttgtcttattcatgataacggccgtgataaccagcaccactgccagaagtatgaccggagtggggactccgcccacgtacccggctcctaaaaactgccattcctttgtgaccacccgcacaggtgagccgcctgtatatacataggccagtccctttgccacattcatggtggccagggtcacgataaacggaggtatggttgtctttgatatgacaacgccgttaaacatccccaccacggtgcccaccagcacgccgcccagaacacctactgctatggggaggccgtaacgcgacacgcagccggctgcaaagcagcctgaaagggcgatgatggatcccacggacaaatcaatgccccccaggatgatgaccatggtcatgccgcaggccaggaacaggttggacgatatctgtctcagtacattgaatatatttttctgggtcagaaaggagccgctggtttttgggaacacggataagaaaatacacaaaataagcagggccccgatgatgccgatattatccttgaaatattgttttacatttttctgcaatctggttgtcatttgactttcccccttttcttactttgccgccagcttcatgatttgttcctgggtgacgcattcctcatggctgaagcacccggttatccggccgtcacacatgacatagacccggtcgctcatgttgagaatttcaggcagttctgacgatatcatgatgatggacacgcctttcttcaccagctcattcataattgcgtatatctcagatttggcgcccacgtccacgcctctggtgggctcgtccagaatcagtatcttaggggctgtggccagccatcttccaatcattaccttctgctggttgccgccggacagattcccgataagctgttcctgggagggagtcttggtatccatcatctcgatatactgcctggtaatctcctcctccttgtctgcatccacccatatgccctttataaagcttttcagcacctcgatggtggagttgaaccggacgctctgaaccttatacagtccctcctgcttccggtcctcaggcaccagggcaataccgaacttcatggcatcaatgggcgatttaatagccgccttctttccttccacactgatgtcgcccgtgcagccggacgtcagtccgaagatacacttcatggtctcgcttcttccggcgcctaccagccccgcaaaaccaatgatttccccttcacgcagttcaaagctggcacctttgaccatctttccgtctgcaatgttttcacattttaaaacaaccctgccgggctccatgtaatccctggtgtaatacttggtcagctcccggcccaccatcatggcaatgagatggtcccttgtggtatcctttaccctctcggttcccacataggttccgtctctcagcacggttacccggtcgcagatctgctccagctcgtccatcttatgggatatatatatgattcccacgcccttttttgtgagctcccgcatggtgctgaacaaaaattccacttccttgtcggatatggatgaagtgggctcgtccatcacgagaatcctggaatgataggaaatagccttgacgatttccaccatctgctgctgggcaatggtaaggtccttgaccagcgtccccgcgtcaatgctcatgtgatatgtgtccagaagctgctgggcttccttttccatggtctcatggctgacccaaagcccctttgacggctccctgccaagaaagatattttccgccacagtcatgtgaggcaccagtaccaattcctgatggataatggaaattccgttgctgtgagatgcatttaccccgtcaatggttaccttttttccgtcaataaaaatctcgccctcttctgcaatgtagatgccgcccagaaccttaatcagcgtggatttacctgccccgttttcaccgagcaatgcgtggacctcgccggccctcagctccaggtccaccccctgaagcgccttgactcccggaaatgatttgtggatgttcttcatttgaagcagaactgtttcactcataatctcacctgcctgttcttctattcatatggttcctgacagagtttcctgccgtacttttctgtttttgtcctgccagataaaaagtgcctggcccccgcaggggcccagcactttttcagactaatctcttactgccatccatctgtgccatacttatctacattttctgatgtaataaggaaggtttctaccggatatcttgattcgaccttgtcgccgtttaagtatgtatacatgatattcaccgcggactgggcaatcttaacgggagactgtgcgccgcttccttcaatcagggattccccggaagccatctctgccttgatgtcaggagagccgtccacaccgtaaatcatacagtctgtaagaccggccgcgttggctgctgccagtgctcccagtgcggtggggtcattgccgccgaaaatagcgaccacatctccgtgagcctgcagcagatcctccgcaatacccatggatacttccagattgcctttggcatcctgctgtgcaacgatattaaagccttttccttcaattgcgtctaaaaatccgttggttctgtccgtaacggaattcatggtaggagaatccagtacaatgatgtccccgccgtccgggcatttctttacaaggtcctcgccgcaaaccttgcctgcgttatagttatcggatccggtataggaaatcaggtaggacatgtccgccacctctgtgtcaaatccaacgatggggattcctgcttccttaagctggtccagggccggaaggattccttccgcctccgccggattcatgaacatggcatcaatgttctgggaaatcaggtcctctacctgggtaatctgaagcgtaacatcattggcaggatccaccgcaatcagctcatcgccgttggcctcagccatttccctcattctcttctcaatggtgacaaagaacgggttggttccgtccatacaggtatagccgaatttgtaatgcttgtccgggtccttcttcttcacatcagcagacgccatatcggccgctgccggcgctgccgcctctgtgccttccttgctctcctctgccttctcaggttcagcggccgcctccttgacttcctctgtggtctgggtctgggttggcgcctctgcggcggcggccgttgtctgggagtccccgctgctgcaccctgccagggcagaacctgccattgccgcgcacatcatgactgccaacagcttcttagtactttttttcataagttacctccttctgcaaaatattttgttgtttttgccgtaatcaaatcttatcatgcttttctttttaacacatgtgcacaatgtaatcatttttatatgacatttgtcatatctttcatcatcacttttactgttttccattctgacgccgtaaattttcatcgttttgcacaactgtccgcggggggatactcattgcacagcaaacggaaaggcggctcatcctcctctatgaccggaaaacggcctgccggcagatagaaccggttgtcccggttatcgtcattgcacatggatacctctcccaacagcacgggccccgtgcccggctccaaatggaaatcgtgatacaagtagggctggatggtaatgctctccccggggcgcagacgtatctgcgttcccgcgggaaccgtatactcccgtccgtcactgtgtatcagcacatccgtatcggccagaccttcctctttgccggcattatatacgcctatgagcacatttccccctcccctgttgatgatgtcctccatcttattccagtggaaatgcatggcggcagactgcccttccttcatgtacagcagcttttccgcatagggttttgtgtacttatccatggacacattgccgtttctcagggtgataagggagaagcccaccctgtcaaaatcccccattccaaaatccgtgatatcccaccccagcatgttatcccggacctcatcgtattcgcgtcccttctccttccactcttccggtgtaaaatagcagaatgggggcagtttaaaggagcatctgtcaatcattttttccatgtccctcagtgccctgttgatttccgaacgtttcatggcctttcctcctttgccgccttactccagatgcgagaacaccttgattgtgtggagcacatcctccttcatggcctggaccgcccactgggtcacatcgtggaaaaatacatattcccccgcatccgcgcatttttcttttacatatatgccgcccgccttggccaggtaggtgtagtaattgattttcctgaccccgttggcaatgcatttcttaaaatcttcgtcgctgaccccggatccgccgtgcatcacaatgggaataccaatgctttcccgaatcctgtgtatcctgtcaaaatccagcttgggagtggtcagatacagcccgtgcacggtgccgaatgagcaggccagggcatctattccggtaagcgcggtgaaagcccgggcctgttccgggtccgtatagcagctctccacagcctccccctcttcgccttctcccacgcttgagaattcctgccttcccatggctccaatctcagcctccacggaagcgcccctgtttccggccatttccaccgcaatctttgtgtttgccgcattttcctcaaatggcagaacggaaccgtcgtacatcactgaggtaaatcccatttccagagcttcctgtaggatttccagcttatcgccgtggtccagatggacgcatacaggcacagaggatttctctgccatcatcaccatcacgggcccgatgaccttaagagggataacggactcgtggaccggcgcaaactgcaggatgaccggctggcccagctcctcggccgcccctaatacggcctgaattccctccagggatgtgatgttgaaggcgcccactgctatcttttttgcatctgccaggtctaagaccgctttcattgaaactaacatattatatattctcctttcctccggcctgcgccgggacatacgtggttttactgtctcttacggaagcatccttggctttgccctggtgaacattccctttttcgtcacagaggcgttattttctatgtcacggacggatgatgctctgcttctcccatcccacctccatcttctgcctcagctcctcaaagggcagcaggccgctcagggcgtcgtaggccgtgacgcaggaggctcccgtggcagctgccagccgcgcgcattcaagtggctcacagccgtccagcatggcctttatgaaggcggctatactggtatcccctgctccagtccccgacaggatgcagtccggcacatagctgtcctcaaaatggctgatgtcattccatcctgtaaatcccggcaggacctccttccacaccggctcaggtgctgtcttcaggtacatgcccgctgccccgcatttcagaagaacgcaccgggtccccatggacagcgctctggcagccaacggctccacatcctccttaaatgacaatatgcccgtgacatccccgcctcctgccgtctcctgccatttacagtacaaagggcggtccagcatgtatcccagctcctcaatactcggcgcaaagaaatccacatagggcagcacccgttccagtatctttgcccagtccatgtccgctgcttcggaatccgggtccaccgccaccaggtccagggatgtggtaagccccatggattttaccttcttaaaaagccttaccagttcctccccgtcatccagatagaacctgcgcatgattggaggataaccaaaatgaaaatgcgccgcttcccccactttcccaaagtccacgtctgcgtagccaaaggtatcattgcagcccggatcgtgaagaaaaaaccggtccagtcccttaggcgccagaacaatggtataggacgtattctctcccggaacctggctgatgcaggactcacagccgtgtgcgcttatcatgtccttcagagcatttccgaaataatcatcgcctattttggccatcaggaccacgtccgctcccagacgtttgagccccagaccagtgttggaaacagcgcctcctgtacacatcatggcctttcccactttaagcagctttcccggctgaaacagttcagagagcttctgcctcccgctgttttggaaaaccggcgtaatgtccagggaaatatgcccggccactgctatctttttatttccttctcccatcttacttcccccttccgcacccaatcatagcagtttttaaaaataaatccaatggtttgtgtgcaattattacataggtaatatttaatgtgacatttgtcatgtacatattgcacaacacaaaaaaagaccctgagggccgtgatattcacagcgcccccagggcctggtaaaccatttatttaaccggtacatacatattcaaatggtacatgcggattccatgcttcaatcacacagctcacgtgattgccgccgctgtctgtcccctgtccccggaccactctatggcatcatatgcctgggcgatgttcagcatatggtcgccgattcgctcgtagtcagtcagcatttccgaatacaggatggaggactccacgttgcagtttccctcccgcatgcggtcaatctggttctgacggaacttacgggttatatcgtcaatccgctgttcaatctcagccaccttaagtaagggagactgggtgtccccggcagctgccgccatcagaagctccatgccttcccggcaggtttcctccataacagcgaattccttctttgcgtaattggaaaactgaagtcctttttcctctatggtttcggcatactccgccaggttcatggcatggtcaccgattcgctcaatattccccagaatggtatacatcctgttcagagtgtcaatatccttgggcgtctggtccagcacaaggatcttggaaatcttccgggacagcctcatattgcttaaatcaatctcctcttcccggtctgctatggcctggattccctccgaagcaccatcctccactgccttgaagctctgggatacgttctctgccgctgttgccagcatccccttaatctcatcatgaatctggttaatagcgatggtggagataccaaggtggtgcttggaggccataagtccctcaaaccactggtccgcatccattacaggcactgccttatccggaagaattgcaatggcaatcttctccagaagcgctccaaagggcaggagaatgatggtcgtgctgatattgaaaatggtatggacatttgcaatctgcgccaccggattatccggagtcaggcttaccacgaagtccgtaaacggagtcaggatgcacagggtcacaaacagcgccgtaccaatcacgttgaacatcaggtgaatcagcgtggtgcgctttgcattgcggctggttcccacggaagccagaagcgccgtgatacaggtgccgatattctggccgaacagcacgaacaccgcactgtgaaggttgatgacgccgcccatggccagggcctgaagaatacccacagacgcggacgaggactggatgatggctgtgaataccgctcccaccaggattcccagaagaggattggaaaatttggtcaccatatggatgaaggtctcagaatccctcagtggaaccatggcatcgctcatcatgcccatgccgatgaacaggacaccgataccggcgataatacctcccacatgctgtacctttttatttttcgagaaaatcagggacatgacgcccacaaaggcgatgagcggggccaggactcctatgtccagggcaataagctgtcccgtaatggtggtgcccacattggcacccatgataatccatacagcctgcttaagtgtcattagacctgagttgacaaatccaacggtcatgacggttgttgctgaagacgactgaatcagggccgttattccggcgccaaccagcactcccagaaaacggtttgccgtaaggcgctccagtatctgcttcatacggtttccagccacagcctccagattggtgctcatcatctgcatgccgtacatgaacagggccaggccccccagcaggcttaaaaccaattctactcccatgtgttttctccttttgtccgaggaaataagctcttaccatattatcactttatggataatcccgtgtgtcccgtaatgattccgggtaaaaatgggcaaaaatatggcatagcccgccatcccaaacaaacgatcgcaggttatgcctcctttatcatattcttgcggcatccgtcacacagggcgtttcccatgatatctatagcctcttttcctgattatttacgatttttttacaacttctttacacatactcattatacgggatatttcatatgtcgtcaatattctttcccgccagtaatgtaaagtctatgtaaattatgtgtaaaatctctcccggaaatacatatatttacaaatatctccgggacggaaccgcaatattatccaattattgagtatatatttttcttattattatacaatgcccgcacatcccatgacccggccgcactttaaagcgcggtctcatgctcgcggccgtagacctcgatctgtgtcagagcggggaaaggagaagggtcgtctgccttgataagctgcccgaaggtaagccatgtgatacccctgcgctccagacggatgatatggggttcaacgctcttttcaagctccactgtctcagaggttccgtcggaaaaagtaaatgtcacctttttccaccagttgtcgtgagggaagtcagccctaaagacttgggattataggatgtcttgccctccccaaaggggacctcatagaccagcacatccccggccccatagatgaacgcctcatccatggtatcatccacccgtatgatatagaagcggttcttttccggaaaggaaaatataatcttatccccctcctcatattcgcccttccatgccagtacggcctgttccctgcccgcggcctctgcctttaccgcatcgtttttatccttcactgtaatctgcatttccatatatattacacactcctcctttttacatcaatacttttgggttctttcattctaccatggagtccctgggaataccatatacaaaaaagattaaattttatactattttaagtattttaaagcattaccgaatattctaatatttacaaaacttttactttttattcatcagcggctgctgttcctgatgttataatagaaaaaaatgaatgaaggggatgattagatgaattggaatgaaacactgagaaacaacataacacgcgccgaggaactgagaacgtatatgagacttaccagccaggaggaggaacacatgacccggatcctggaacggtttcccatgacagtcaccaaatactatctgtccctcattgactgggacaatccggaacaggaccctgtgttcaggatgtccataccctctgttcgtgaaaccgacctgtcaggcgactttgataccagcggagaagcggacaacaccgtgcttcccggcctgcagcacaaatacgcccagacagcactcatcctgtccacccaccggtgcgccatgtattgcaggcactgtttcagaaaacggctggtgggaatctccgatgacgagacagccggaaatgtggacgagatgactgcctacatcggttcccaccctgaaatcaccaatgtgctcatatccggcggggattcctttctgaacagcaaccaaaccatacgccggtatctggaagcattcagctccatcagccatctggatttaatccgtttcggcacccgcacccctgtggtgctccccatgcggatttatgatgacccggaacttctggatatattggcctcctatacaaaaatcaaacaaatctacgtggtgacccagttcaaccattccaaagaactgactccggaagcagtaagagctatccggtgcctgattgacgcaggtgtcattgtaaagaaccagactgtgctgttaaagggaatcaacgatgacatccctatactcggaaccctgttaaaggatctgaccagatacggcgtcattccctattacatttttcagtgccgccccgtatccggggtaaagggccagttccagattcctctgacagagggctgccgcatcgtggaaggggctaagaacatgcagaacggccagggcaaatgcatccgctacgccatgtcccatgtcaccggcaaaatagaaatactgggccctgtgtccggcggaaaaatgctttttaaatatcatcaggcaaaatacgaaaaggatctgggacgcatattcagtgaggcattggcaccgggacaggcgtggctgtagagcgggattgaccatacctcagacaaatttcaagccgcgggacactcccctgataagggcatgtcctgcggcttttcttctgccatgggcagctgtctatgtaattacatcagtgacagatacaggttcttgatatcctcaaaggatgggtcctttggattgcccgggcggcaggcatcatccatagcggactgtgacaggaaatccacgtcctcaggctttacgatttcctttaagtcggccgggatacctacgtcagcggacagcttctttaccgcgtccactgctgccttacggtactcctcctgtgtcatgttctcaacaccctccacgcccatggcagcagcaatgtccttgaacttggttcctgtgcagggtgcattgtattccatgacggttggaaggataatggcattggcaacgccgtgtggggtatcatataatgcgcccaggccgtgagccatggagtgtacaatgcccagaccgcagttggagaatcccattcctgtcagatactggcccagagccatgccttccctgccctcaggcttgttctccaccgcatccctcaggctgcgggcaatgacttcaatggcttttaagttaaacatgtcggtcatctcccaggcgccctttgtggtatatccctcgattgcatgggtcagggcatccatgccggtggctgctgtcagtcccttaggcatggaggacatcatctccggatcaaccactgccactgccgggatatcatgggtatccacgcatacgaatttacgctttttctccacatccgtgataacatagttgatggtaacttccgcagcggtgcctgccgtggtgggaactgcaataatcggcacacacggatttttggtaggagcaacgccttccagacttctcacatcctcgaattcagggttggtaatgataacgccgattgccttggaggtatccatggaggaaccgccgccaatggcgatgatatagtcagctccggatgccttgaaagccgcaactccggtctgcacgttctcgatggttgggttaggcttgatatcggaataaatctcgtaggccagtcccgcatcctccagtacctttgtcaccctgcaggttacattgaacttaatcaggtcagggtcggaacatacaaaagccttcttaaacccccttgcctttgcctcatttgcaatctcctggattgcgcctgcgccgtgataggatgtctcgtttaatacgattctgtttgccatgattctcttctcctttactttgactgtacgccgccggacccatcttaactgtccgtggatttgcttggttgcttttacttggttgcttttgctcagttgcttttgttaatattataacaactcctgttttaaaataaaagtgacaaacatccctgtctgtcactttcttttaaggtttgtgcagtttcaccatttataattatgcataatcaccattttcagtctctgctgcggctgcaggtatccggaacttttagagaagcttcagtttaccgaacacctctgccagctttggcggcatggcttccaccagcttatcagacatttcacggggcgagtccttcatgcctcccagaacccacttcacagtcatgtatacggatccctggcagtacatctccaaaaggaactggagctcctggcccaaaggctggctggtctttcttgcaatcaggtccgtataaaactggagaatcagttcaaagtcatgttccttcaatgaattcctgtcatcggaccggaacgcctctgtaaaaaacaccttttcattgaggatgaactcaaacttccgggtcaggctctcccccaccgtgtgccccatgccaatctgttcaaaggactgaagcaccagcttgtcaaaataccagtttatcaggtcgtatttgtccagaaaattcctgtaaaaggtctgccgggtcacgccgcacccctccacaatatttttgaccgtaatcttatccaccggcgctgccttcatgcactccttgacggattccgccagcctgtattttgttttctcctgctttcctgtaacggccatggtattcctcctgcggcaggtactggataaaaacgccccggtacctgtgtcattttgtaacttatccccacacggcggcaggcagtgcagccatggtcgcgccgcactgcccgctgcttctatggacagtatatcaaattttcagtcccgcttctacctgtttttgaaaatgcttaccattgccttccacatctgcaccagaacattccacatccgctttaaggggctttccttggccttggccacttccgcatccgcggtcttggccgtgtcgtcatccacgctgatctcatcggtacgcatgacaatctgcaatgtcttaggcggcttgttccggtccgaggtaaaggataccttgtctgcggacggatccataaacaggaagcggttatccgtatcaaacttatccagctcattgtcaatggtatccttcattgtacgtccggcctggcgcatggcagtagtgctgtccaggatattcaggcttttatccagaagctccatgctgccgcgcaggctgtctctggctgctgcgtcaaaatcgtcactgctgtctttcagggtgttctggataatggtcagtgtactgattccattgttgagggcatctgtggtgcgccgcaccagctcccgggagtcatccagggcagtctggaggtccggataatatacatccagagaatcattgagagcctttaaatcctcaatcagataatccatattgtcaactatctcggcgctgtatttcgcggaatcagacgtatcatccatcaggttcgacatcctgtctgtcagggatttgctctgtgcagacagatcctgaaggactgccaccttttcatacagagcctgttcaatggcttttgcggctccctgcggatcgggactgcttaccagaggaatatttttcctttctatggatgcggttaccgagattcctgccaggccggtgtttccagtatttcctgcatttttcgcagaactaatgacagtgccggtatccggggtgctgctgccggtatctccgctggcagtgctgttttcagcagggcttccgccggtatttccttctccggctgtgcttccgctttcacttccgttcccggtcccgcttccgctgacgcctccgcctccggctatgcttccgcttccgttcccggtttcgcttccgctggcgcctccggtcccgcttccactttcacttccgttcccggtcccgcttccgctggcgcctccgcctccggctgtgcttccgcttccgtttccgctcccggtttcgcttccgctgacgccaccgcttccgtccgtacttccgctcccggtcccgcttccggtcccgctggtgcctccgcttccgtctgtacttccgcctccgctgccttcttcggttccgcttccgccggcacccccatccggattatcttttccatccgtactgctgccggaatttccgctttcctggtcatttccctgattattattctgggtattttcctggctgccgcttccgccggaagatgagtggcttccgccatttgataccccgtaatccacatcctccatgtcctccagctcttcctcatccagttcctcgtcgtagagccttctggccttggcgctggaactcttatacaagctgagatacgtaagcagtgtgtcctgggatgcctgaagctgggtgtccagcgcaataatggattccatggtcttcttaagctccggcaaatcgctgctgataccgcctgcgctgttttcaatgttcttaagtctggtctgcagttttcttaatgggtcctgcatgtctcccagtgtgctgacaatgtcattcatgctgctgtgaaccacctcagcacagtccttggctgtctgaagatgaggaatcatagtatccatctgctgagacaccgatgtaagtgctgccagcgtctggtcatttcccgccagtatgctgtccttggaattactccacttctgtctggcgctctccgctgaatccatgccctggcggacctgattcacgccctgcctcatgttctccacagactttgccatctgttccaggctgtcgtaaagctcatctcccgcgtcctgccatgtatccttggcttccttcaggtccttgatatgttccagatcctcgaccgttcccggcaccatggccataatcacgcctatggtctcaaagctgtccgtgccgatgcgcactgtataatctccatcctcccccggaagggcggtaaataccactgccgtggtatcccccaggttctgggtctgggaaccctccgcctccacactgtagcacttgctcatatccacaggcacagccaccataagcatcatgttgttgcggtaatacgctccggcattgtcattgggctctgccttcacattgatttcaatcaggcccgaagcccctgccagcttatcggcgtccgtgggtacaccgttcagcttataagatacgtcaaagtcccagggcagtaccattatgtctttatccacagcgcatttataataaaatcttcccctctgggcctgtggaagctgccatgtaaccgtcccgtcccccagcacaggttcaatgctgttagacatgttaatcacattttcataggtcccgtaatccgtaaactcggtccggccattgagccccactccctttaccacattaatcttatctaccctgccataataatccaggttcacatacatggtttcatccacgtccacggaggcctccgctccgtacgcgggtaagctgccagtgccggtgcaaagcatgacaaagaccattcccgctgccatgattctattatatttcattttcatcactttccacctccgctggttctaaatcagtccgctttaatgcggacgccttgttgacaatggcgcctaaacctgcctttatcagggctttgcgcttttcatggcgctgtttcagatatttctgcaggcggtcccactcattgctggtaatgatgcggtcaaacagcaccagaagggccggcagcacggtcagcaccagaatcacgctgaacagcgccccccgtccaatcaggtggcccaggtcccctatggctgctgtcgttgatatgaaatgtatgatatatcccgccaatatgataatggttcccgaagtaaaaatagaaggacaggagagcattaaagcctggatacatgcttccttcttctccagggactttctgcatgacacataattattggtcagcaggatggaataatccactgtggctcccaactgtatgctgctcactatgatatatcccataaacaccatggtatcccctgccaggtacggcatggccatattgagaaaaattgcagcctcaatgggcaccattacaatcatgggtatggcaaaggaccggaaactgaacattaccaccaggaacacgcccagcatggacaataaatttaccctggaattatccgccgtgatagtggtcttgatatcctgtgttgagggtgtttcccccaccagataggaattctccggataataccgctccagaatatcccggatttcatccgcgcccttaaatgcctgttcgctctctgtcttggtccgtatgtaaatgagcatcctgcagtaatcctttgtgtggagctcgctggtaatggaatacggcaggaattcctcaggtattccctccggaagggtattggacatggacgtcacactttttacatagggaagatcctctatctcatctgacatcgctttctccgttacggctgaagtattgggatacatggccagcatcatattgcttcttccaaattcctgggagattacctggtcgtccctatagacctgagttccctcgctggctcccaccgcgctgttgccgtacaggaaatcattcattccctgggccacataagcgggcggcgccagaaacagcataatgataagggaggcataacgcaccctgtagacccattcgctgaatttccgaaaggagggcaggaaggggcggtgcctggtcttatcattccacttggaaaatttgagaatcatggccggcataaaaaacagcacggttataaggctgaacacaattccctttgccagcaccagtcccatatcaaacccgatggtgaacttcatggataccaaggccagaaagcctaccaccgtagtcaggctgctggcaaatatggaattgatggcagcttcaatggcattgatcatggcctgttcttctgaaagacccttctgcttttccctggaaaatgcatccagcaggaaaatggagtagtccatggaggttgccagctgcagcaccatagccacattattggtcaggaacgagactgtcccgataaaaatattcgtgcccctgttcagcaaaatagccactcccataaccagcaggaaaaggaacggttcggaccaggcggcggtactgatgcaaagcaccgcaaatatcatgatgacggcaaccgtgaggatgaggttcatctcgctctccacattttccgtcagggatttattctgtaccgccattcccacatagtatcccttatcccctgtaatggccttcatctcgtcaatggcctgggatgtcttctttgccgtatccccctggtcaaaggtgatatccattacagcgcagccgtccttgtagtaatccttaatatcctcctggcgtataaaatcctcgcccgaatagatattcaccgtactgtcgcaccatagaatctgatccaccccatccacggcttccagcttatccttatactgctttgcctcatacaggctcacatccttgatcataagcctggcagtgcccgggtagccgaattcatcctccatcaggtccagtccgatacaggacctggccgatgcaggcaggtactccgtcaggtcataattcacatttacaaagagcatcgctatcagggagaaaacacaccctgccgcaaagacactctcaatccatccttttttatgtatgataaacctggccatgcggaaggaaaacttatccccctcctgcatctcctgtccttttaccctgtgcattctgtcctttatcctgccaaacagcttctgtcccatactccatgctccttatgtttccgccccacggcggccatgccctgcgggccttatgccccgtgccgcgcatttccgctccggcattctgcttccgcattccgcttccgcattccgctgcaaagtccttacgcttaccgcatcagaatcaccataaaatactgttttccgtccttttccctgtgagccatccccaggcggcggtaatattccagggaatacttccggtctgtctttgactggaaacgcttatccagcttttcctttattttgtcaaatgcctctgacgcgtcatcacagtccctcacgtacagctccagacaggaagcactccttctgtagttgataacggacaggtaatcattaacagtaccttcgccgggaatcctgtcatccgcatatccccctgccatggctccgtccagtctgtggcccgccgccttgttgagtgtcatatccatttggaagcccgcataccggtcatagacacggtgcatatcgccgtcatactcatcctcacggtccgggtattcctcaaagtataaatccttcttttcctcattcagctgatcaaataaatcctgggccatatcgtcgtagcatcccgcatcataggcacctccgcccgtattctccacccagccggcagaaaccagggctccctgcgatgaaaactcatatttcccgttatccagtatcagctctcccaggttcatgcctccatccccgtggaagtagtaccattcgccgtccacttccctccagcccgtaaccatggccccgttttcatccatataataggaccttccctctgtccggagccatcccctatgtaaatttccgtcctgttccagccaataccatcttccctctgcctggttccagccaggaataaatgaggcggtcatcacctgtgcctgctcatccgccagagccgtcacaggtccggccccctcaagggcccatagagctcccgccatagccagaatgaccgcacatcttctatatctcataccctttgcccccgttccttatatatatctattatacatcttttatatcgttaaacaacttccgttttgttaattgacttttgtttatttattgactataatggattataataaattatggcaaaaatacaatgattaattttcttagttttgacggttaatcaacactttttccatttttgtgcagaatgcaattgttaaatatttgtaaatacacgcaaacctatataaccaaaaggaggaacagatgatgggcattgaacctgtggaccgccgggtacgtaaaacccgcagacagcttcgtgaatgtcttataacattgctcaaggagaaaaaggtccaggatatcacggtccgggagctgaccgacatggcggacttaaaccggggcaccttttatctccactataaggatgtgtttgatcttctggaaaagacagaagcagagctccaggaagatttcaaccaattggtccgtaagcatgacgctgtggatctgaaacagcgcccttctgtcatattcaatgaaatatattacttagtatatgataacgcggacctgattgagattcttctgggtgaaaacggggatttgagttttgtgaaccgtctgaagcagctcatacgtgagaaatgcctgaaggactggatggaggtgttccgatccggcaatgcggctgcttttgacgctttcttttccttcattgtgtcaggatgcatcggcctggtacagtactggctccagacaggcctcaaggaaacgccggaacaaatggcaaagctgacagaacacatcatcaccaagggaatcggtgtcctggaaatcgacccctacgtataatatcgtctgaacggtttccatttcctatattaatgtcatgtatgcgtagtgtcatgtatatccataaaccggatgaatttttctccatgttatgatatgatgggaaataaaccacaacagaaaacaggagaatacgatggaaacacgaaatgaatacagcccaaaggcaattgtccgcatccgaaaaggacagggacgttccctaaaggccggaggcgcatggatttacgataatgagatagagagtatcaatggagcctttgaaaacggcgacatggtgaccgtggaggactttgacggatatccccttggtaccggctacatcaatacccggtccaggctgacggtccgcatgatgtcccgcaggaaggatacggtcattgacagcgattttctggaaatgcgggtacgcaatgcctgggattacaggaaagcggtgacagacacctccagctgccgcgtcatattcggggaagccgactttctgcccggtattgtcatagacaaattttcagatgtgctggtggtggaatccctggctctgggaatcgaccgtctgaagccggtcattgtggacaagctcagaaaggtcatggcggaggacggaattgccatccggggcgtatatgagcgcagcgatgccaaggtccgtctgcaggagggaatggagcgccataagggattcataggagatgcctttgacaccaaggtggaaatcctggaaaatggggtccgttatatggtggatgtggaggacggtcagaaaacaggcttcttcctggaccagaagtacaacaggctggctgttcagaatctctgccgccgcatcaaaccggaacaggtgctggactgctttacccacaccggttcctttgccctcaacgccggtctggcagggtccgcacatgtgctgggcgtggatgcctcggagctggcggtaaaccaggccagggaaaacgctgccctcaacggcctgacggaacaggtacagtttgagtgtgccgatgttttcgaccttcttcccaggctggagcaggaaggccgtaaatacgatgtggtcatcctggacccgccggcgtttacgaagtccagaaattccattaaaaacgcggtcaagggctaccgcgaaatcaacctgagaggcatgaagctggtaaaggacgggggctatctggccacctgctcctgctcccatttcatggacccggaactgtttaccaaaaccatacgtgaagccgccggcaatgtacacaaacggctcagacaggtggagtacaggacccaggcggcggaccatcccattttgtgggcagcggatgagtcttattatttgaaattttatattttccaggtgtgtgacgagaaataggtctaaaaataaaaaaagccctgaataccggtatgagatgcaatgtacgccattgtcggtatctcggggatttttttcttttattttccatgaacaaacggcaggataaacggataagctataagtgagatgatatgataaaaggatgcgtcactgtatgtatgcggctgaagatttacggctgtaggtttatggctgtaggtttataacggcaaatttatggctgcacacttatagctgtgcatttcacagaaaggagcggacatgattatactcattatatttctgatactgactgttctatccatcctggtctgctgttttgtggcaggctcaacgccctatgacagggaggccgacgatgaagcgcagctggaatttctgcgcaaatacagggaatcaaaaaacaggtgaacagaatcccttctatcttcaaaccactttcccttttcccagccagccgcatactttcccgcggattctctcgtggaacatgtcgattaccggacccagtccaaaggtgcacacgatggttccaatgccaatctccccgcctaaaaaaaacgccagaaccacgcacaccgcatccagggacaccttggcggttcccagcctcatccccctttcatggagagccaccaccaggtcatcggtgggattggtggggaatacgctgatgatatagcaggccactgcaaatgcaaccgccgccgcgcctgccgccataatgagcagggaagctgccagccctgtaccctgtacaggcgccagaattgtcttccacatatccgtaaatattcccagaaaaaaggacgaaataaatgtctccagtctcggatatccctttctgataaaagcagccagaagcaccaccagaaaggcggtggcataaatggcaagggatgtattgatatggagccgttctgccagggcaaagttcagggcgtcgtagccgccggcgcccaggtgggcgttgatggtcaacaccacgcccatgggcatgattcccacgccgatggcataaagcgccagattgcaggcccattctccgggtgtcatgaatttccactttctcagattcatgattcgtcctgccttatcacaacattctccagactgctgcgggccgcctgtcccctgaaattcttaagcgtcatatcccggcattcttccgcatacaaagcatggctgaaatcatttttctcctccccctcgaatttcacctggcagttccgcaggataacatggtcggctctgcgcatataaaatccggaggtcttgatctcctcgatcctctgtccgtatcccggacgcaaatcgtacattccttttggccatttgctcttggctctgacaaccacacgcacattctcaaaaagaatatcctcaatatggtttccccggcttcctgacaggaatacgccgttttcagagtcgcaggttatgttggaaaaccgcacattggatatgtgtccggatttggtgtgttcatccctgtcatgggtggatatggtaattggttccgcgcatccccaccagcattccgcaaaccgccttgtctctatgataatatttgaaaatgaaacattcctcacatttcccccgtcccggatctggatggatataccgcggttgctgtcactgatgatgcagttatccacaaccacattctcgaaatcccctgctccctctgtgccgattttcaatgcagcggaggtggacgtgagggtacagcctgagataattacatttttaagaggcccgtattccatatttccggaagagctcttcagacatatacagtcatccgcgcatgtgacgtggcagccaatgatgcgcacattggtagaatggtccgggtcaatgccgtcagaattagccacattcaaatcatttaaaatccgaaggcccgatatgagcacatcgtcacagccagccggatgcagggtccagaagggggcatttctcataattacatccttaaatgagatgtgattgcaatgctccacatagaccagagtagggcgcggataaaagtcgcccgtcacataatatgggctcacctgccgcacaaaagcataggcatttccgtcgatggctccttctccggaaatggctatgttgtccgcatcctttgcgtaaataaacacataggtaggtttcagggtcaccggagttcccacccgttccacgccgtcgtctctttgtccggcgttgggatggaagtaatgctccagatccttatgggcctgtaatactgccccccgttccaggtgcagatccacgttttcctttaagataatggagccggaataaaaatgctttccgccctccagaaccacccttccgcctccggccttactgcaggcgtcaatcgctgcctggatagcaggcgcgtcatctgtgacgcggtccgcctttgcgccaaaatcaagcacattaaaagtcatagtcaaacactcctttcctctgtcctacacagcgccgaccagggtcggaatcaccatggagaaccagggcacataggccaccagcatcagtgcggcaaagatagccccataaaatggtaaaataggctttatcatatcctccatgtcaatgccagccacggaacagccggaaaagagggcagaacccaccggcggggtaatattgccgatacccaggttcatgatcatcatgataccaaaatgaatgggatgcatgccaaaactctttaccaccggcaggaaaataggcgcgaaaatcagcacggccggagtaatatccataaaggtgcccacaaccaggaagataatattaatcatcagaagcaccacgtacggattggatgaaatgcttagcatggctttgccgatggctgccggcagtcctgtaaaggacatgacaaaggacatgatggaggaagctgcaataaggaacatgataacagcagtcgtctcacatgcatcgcacaaaatggccggcaggtcctttatcttaatggtgcggtagcacacgatggacaggaacagggtgtaggccactgccaccgcggcagattccgtggccgtaaatataccggaacatacgccgcctactataattacaatcagcagaaggctgggcaccgcatcaataaacgtatgtatgaataccctggccggaacagccttggtagtcggatacttattcttctttgcaataacaaaggccaccatcatacaggcaatacaccacataaatccgggaatatatccgctcataatcattcccaccacggaacagcccgaaagcaccgcgtagataataaggattcctgagggtgggataatgagtccggtaggagcagaagcaatattggccgccgccgcgaacttgcggtcatatccctccttttcctccaggggaatcattacgcctcccactgcaatggaggctgccacagaggagcctgatatggatccgaacagtgtgctgcccaggatattggtgtgggcaaggccgcctggaataaagcccacgaacagcttggcaaaattaatcagcttttgggcaataccgcctgagttcataaggacgccgcataaaataaagaaaggaacggcaattaaagaaaaactgtccacgcccgtaatcattttctggctcgccacaaaagtagccaaatccaggtccatgacacaggccgttgtcaggacagacgaaacaataagacttatggatacgggaacactgagggccagcagcagaaaaaatgtcccgattaaaattaaaccaacttgtaccacagacattgtcatgatatatcgttcctcccattctcattttttggggtatccgccaggtgtgatgagtttttttgttccgcaataggatgttctgctgtgaattgcccccggttatccctcagttccttcacatcctccccgataaaaataagggcatagaagataaagagtaccgcacccaccagcaggcagctgtagatataaggcatgggaatccccagagccgcggaagactgatccgcggcagtggcgcaaagtctgagacctcccattaccattaccacgatgcagaagacaatgacgaggcactgcacgcctatatccacgattttctgcatggacggactgacttttttcaaaagtatattaatggaaaggtgcttcctctttccgtaggcataggctgctcccaccatggtggtccacaccagaagatagcggagagcctcctctgtcactgtacttggattatttaaaatataccgggtgatgacctgccagcatacagccgctgccatgatgcccatgatggctgtgcacagaacccggatgatactgtcaactacatttctcatttccttaccccctattcagcatagctcagaaaatccgccagatatctggcattgtccccactctcagcgcagaatgcatcatgctgggactttaccgcctggataaacggcgtcttatggatttcataaaattggaccccgagttcctttgccccctggatattgcgctccacaatttcctgccatttctcctcatgtttccagaaactctcatccatggccctgagcagcgcctcctggtcctgctctgacatagattcccaggtcttagtggaaatgatgacgatatccggcgtgtactgatgctgggtgtaggtataggactttgccacctccccatgcccgtcgtccaccagcactgtctcattattctcagcgccatcgataatcccctgctggagggaggtataaacttctccggatgacatgggcgtggccgcccctcccatattgcgtatcatttcaatggaagtagggctgtcctgggttctgattttaagtcccttcagatccgccggactctccaccggcccctccttggttgtatagacggaacgggctcctgaatcataccatccaacggcaaaaaatccctggtcatatgtggatttgaaaatttcctgtactgcccggctctcctccatcaccttaaaatagtgttccgtggactgaaatacataaggcagtgaaaatatggaataggccgggttaaactgttccaatgagctggcgctgaccttggcaacatccagtacgccggctttcaccatctgaatcatatcactgttgccgcccagctggccgttgggatatatggaaaatgtataccccgtattcttttccatctcatccttcatataagtcagccccacatggacggggtggttttcgttgtgggaatgggccaccagcagatgggttccgctgccccctttactgcagccggtcaacgagaccagcatggatgccgccaaaaggcagtatagaattcctctcctctttttcatgttcctgtctcctgttatttactggaattaacatagagcctgctctggtgcgcgtctgggacgcactctggtacggtaccgtatgaagtgtttacatttttcacttcccatgttatagttctattataattgcaaactctttcaaagaaaattgagttatttggtaaaaacattgcaaatcttggaagattgaaattgaaaatcgaaaggctttgtgcggatgtgctaaattagccagatgcattttatgcaatgcgccgaagaatagttgagataagatattgaattgagaggcaggagacttatggttacatcatccaaccgcgaaaaaatgctgaagcattatatgcgcagcagtgattttgagctggaccaccaccgggacgtcacctatcccgcggtagaaccccattatcatgaattttatgaactgctgtactttataagcggccacgtggattacattataggagatgagatttaccatctgcaaaacgatgacctgctaatcataccgcccaatatcatgcataatcccatctttgcagatttccgcgtaccatacgagcggtacgtcctgtggatatcgctgccggccctgcggcagctggcttccatcgatgaggacctgaactactttcttatcgcaaaggggatgaaaaactatcttctcagacgccacaccactgcctggggcaacttccgcaccatcttcacctcattagaagaggcccttggagaacagaagcctctgagacatgcacaggtcaaggcattcatcctgcacctgctggtagaatataacctggccctcatggaagattccggcacggcccaaagcggggtaaaagataacccgctgacagatatcctgcactatatacagaaccatctcacggaggatttgtccatggacaccatttcagatgccttcatcatggataaatacaacctgtcccatatgtttaaggataaaatgggaatctcttactaccaatatgtgattcagcagcggcttttgactggcaagaatctgattctggagggcatgcctgccaataaggcttgtttcgcctgcgggtttaatgactactccagctttttcagggcgtttaagaaggagtatgaggtgtcgccggcggcgtttaggaggattcatgaggggatgattgggtgaagtgggggccctgttgttcgtatatttaccgccggaaacgcgtacagatacaagtgttcatcctgtgtaccaggcaaaaggtatcaatgctgcccgggcagaagcaatagcagctatacgccacagtgcacttgatgtttttgtatattctggtaaaataataagggaggggagcagtcggccgatatataaaaacaaaatgtgaggtatgtcaatgtcagaaaccaatgatgaaatagagatctgcatcccggacctgctgcattccatctgggagcttcgctggattgtattattccttattatgctgggaggtatagccggcgctattctgtcctgggacagcagccctcttacgaagcaagagcttcgatgatagtaaatgccagaaatattaatgacctttatcaaaatgggtcggatattcccagaaatgaagatatccaaacagcgaaaaatcttgtaaaaacagtgcagcttttagcaacaagcaatcgtgttctggagttggtattggatacggatgaatacagcagtattcctctggaggaaataaaacaggacatttctgtaacagctgaagatgacactgcatttagatggagaaaaacgcaatgagccccgcataggtgaaaatctaagacagcaagtggaacagatgtataatggtatttacaccatacaggggttctctcaaaaaaaatatctttcaggttgataatcagatttttccagccattcaatccatgaaagatacatataactatattctgattgatacgcctccaataggtactctgtctgatgtgcagctgatgcgcgggctaatggacagtgttgttttagttgttcgtcctggttgggtattacgcagcgccgtggaggaatctctggcattcctgaagaaatccggaatcccgttaactggcggtattgtaaatggcaaaataccgttgattggaaataccttaaaacgcaatattcaagcgagaaagtcttaaatccctgacggtcagcccctggcctgaacctcggagattttatttccccgtaggcaaaggagcggaaaatatcctatcaatacccacccgcttgcagcagcccagcctgccacaacaaacgcacatattcaggcataaaactgtctgcattttaacattataaatgaatacatacgaaaaataagagcccctattagcgttcctaacgtattagttacaatatcatcaatctggaaatgacctcattctgtaatcaactgtatcatttcaatgatacagctcagacagaatcccagaaaggagcatacaaacggattcctcaactgtttccattttagtggaataaagattccaaaagggataaaaagaagtacattctcaatcacatatgcatttgctctgggtcctcctaatgcctcaaagaatttaagacttattcccgtacgcgaccctggttcacgctcaaatatggttatgataaaaagcattataaagtagctagtataactcgatttaaataagtttacaatttaagcattggtagtaatctgatttcttggcttacgtgtccgtgctttgggcgcacgtttcccttggttttcaggataataatgtaaacttattaaaatcgagttatactagtgaatagggtgatgcatataggctttttgtgacggcgtaaacatatgatggttatcagatataacagaatacccaataaaaaagctaagggaaggtattgtatttctttaagtatatcctgcaagatgtattgaatggttttggaaaatggcgaattcaagtggtcggctccttttaggcatggtatggggaattttggaagatatgttcctttgcctttatataaatatattttatcacattattacagaagtgtattctttatatcggtgaaattttggacttgtaactgtcaagtaatcgtcggcaatttttttcatatcagatttgcccatgcttttttagctccttacgtcaaccgggagcggtcattccaaacgcaaactcgctcccgctccggggacgcgtctggtataccgcttccctacggtcaagatttttatgtgcgtgaagaatccttatctcaactaaaagaaggaaagtataaaatacagttttggattaataacgaaaaggtgcaaaaagacttttttacgattacatacaaatagctgaaaaacctttcaagagacaggggcaggaaaacgcaaattgtttttctttccctgtctcttgatatgcgattgtttataatgttttattttttaatttcgtttttcagcatacgcttgattttatcactcatggtttcggtgctggccttgctgaaatggacacgcaccttataagtggtcttgccgattttcttcaccagcgtgggggcgtcctccggcgctctggccgatgtggtggctgcggtctgcatggcacgggtgtcttcgctcatggcgctcctttctccgggcggggcggggccgcccgctcaatcattcttacggttcacaaggtctttggccgcagctttggcggcatcggcgttttcctcccggaagttcttcccggcaaagaggatggggcgcaccgttccaatatgcggtcatagatacgggcatgggccagagcgggcggttttttcaactcggacagtttcaggttggtggtgattatcatgggcctgcggctgtggtagcggctgtcaatgacgaaaaacatctgctccatcgcgtagtcggtgctgcgctccacgcctaaatcgtcaatgataagcaggtcatattcgtccagactggcgataaaagcggccctgtcctcggagaacatccccgtcagtcggttcaggatagtgggaaagttcgtcatcagcaccggcacatctcggtcaagcagggcattggcaatacatccggcgaaaaaagacttgccggttcccacatccccgaacagcagcgggccggtgttgttcccgtatgcctccttccagttctccacataggcgcgggccttatccatcagcgggttttgtccgttatcattggcaaatgtgtagtcacacaaatagcggtcttgtaggccctgcgccttccgccgcttgatacgctccatgcggcgctgccgttcctcggcctccctctggcactggcagatacagcgtggcatgaaatagccgggtttcccgaaatttggcacaatggtctggcgctggcccttgcacttcttacagtggataaggccgtctgccgggtctatgtattcattcccggccagctccgcgccggcggcggccttatcaatcagcgcccggatttctgcggtaatctcaatcatacggtttcgtcctcctttacgctgtaatcccgctcgcgtgtgggcgtggccgttttttcgcatcctcgctggcccatcgccggatgggagaagtttctggcgctgtaaacgcatacgctctttctttttccgttcccccctcggtagaggactgaccgatcagcagttgaatatcggccatgtagtagtactacagcgaactttttaaaagtttggtttttctgtgtgatagataggcattatggttcctgcgtatatggtaacttactatttttttcatatcagttactgtatatacaattatcccatgcatgagtttgattaccatct
